(19) United States
(12) Patent Application Publication
(10) Pub. No.: US 2026/0092259 A1
(43) Pub. Date: Apr. 2, 2026

(54) CELL ADHESION SYSTEM FOR INTERSPECIES CHIMERAS

(71) Applicant: THE BOARD OF REGENTS OF THE UNIVERSITY OF TEXAS SYSTEM, Austin, TX (US)

(72) Inventors: Jun Wu, Dallas, TX (US); Emily B. Ballard, Dallas, TX (US); Jia Huang, Dallas, TX (US)

(21) Appl. No.: 19/286,057

(22) Filed: Jul. 30, 2025

Related U.S. Application Data
(60) Provisional application No. 63/678,050, filed on Jul. 31, 2024.

(51) Int. Cl. C12N 5/071; C12N 5/074

(52) U.S. Cl. CPC C12N 5/0697; C12N 5/0696; C12N 2513/00; C12N 2517/02; C12N 2533/50

(57) ABSTRACT

Disclosures herein are directed to populations of cells comprising one or more cell of a first mammalian species and one or more cell of a second mammalian species, such as stem cells and embryos, wherein the cells are engineered to express an either an antigen-binding protein or an antigen, wherein each are expressed with a cell membrane signaling peptide and/or a cell membrane anchor protein. The inclusion of the cell membrane signaling peptide or a cell membrane anchor protein enhances cell adhesion, enabling improved formation of interspecies chimeras, for example the generation of a human and non-human interspecies chimera. Also provided herein are methods of manufacturing the population of cells as described herein. Also provided are methods of organogenesis to generate an organ, organoid, or tissue mass comprising an interspecies chimeric animal for organ transplant, and methods of treatment using the same.

### SEQUENCE LISTING

[0001] The instant application contains a Sequence Listing which has been submitted electronically in Extensible Markup Language (.xml) format and is hereby incorporated by reference in its entirety. Said XML copy, created on Dec. 15, 2025, is named “106546-852065-4402 SL ST26.xml” and is 643,072 bytes in size.

### FIELD OF THE INVENTION

[0002] The present disclosure relates to improvement of cell adhesion systems and their use in developing interspecies chimeras for organogenesis for organ transplant.

### BACKGROUND

[0003] Organ and tissue transplant can save lives, however according to the CDC on any given day in the United States (US), there are around 100,000 people on the active waiting list for organs, but only approximately 14,000 deceased organ donors (data from 2021), with each providing on average 3.5 organs. Living donors provide on average only around 6,000 organs per year. Additionally, in the US, around 3.3 million tissue grafts are distributed each year. About 2.5 million grafts are transplanted. Organ and graft rejection is also a common problem that can result in serious complications and even death.

[0004] The technique of generating interspecies chimeras using human pluripotent stem cells (hPSCs) is a promising in vivo platform to study human development and offers a potential source for growing personalized human tissue and donor organs in animals. Although robust chimerism can be achieved between closely related species, it is far more difficult to generate chimeras between evolutionarily distant species. The low chimerism of human cells in animals (e.g., mice and pigs) is presumably due to multiple xenogeneic barriers during early development, which include but are not limited to differences in developmental pace, incompatibility in cell adhesion molecules, and interspecies cell competition. Several strategies have been developed to improve human cell chimerism in animal embryos by genetically inhibiting human cell apoptosis. However, these strategies are not practical for future use in regenerative medicine as the modified genes and pathways are mostly oncogenic.

[0005] There is therefore a need in the field for methods to facilitate and improve establishment of mammalian interspecies chimeric cell populations for proliferation mammalian host animals.

### SUMMARY

[0006] Provided herein is a population of cells, comprising one or more cell of a first mammalian species and one or more cell of a second mammalian species, wherein the one or more cell of the first mammalian species comprises an exogenous nucleic acid encoding an antigen-binding protein that specifically binds to an antigen; and a cell membrane signaling peptide and/or a cell membrane anchor protein, wherein the antigen-binding protein is expressed at the cell surface of the one or more cell of the first mammalian species and specifically binds to an antigen at the cell surface of the one or more cell of the second mammalian species, and wherein the antigen is endogenous or exogenous to the one or more cell of a second mammalian species.

[0007] The cell membrane signaling peptide of the one or more cell of the first mammalian species may comprise at least one transmembrane domain; bind to a signal recognition protein (SRP); target the antigen-binding protein to the endoplasmic reticulum (ER) membrane; introduce a lipid anchor; and/or localize the antigen-binding protein to the cell membrane. The cell membrane signaling peptide of the one or more cell of a first mammalian species introduces a lipid anchor, optionally wherein the lipid anchor is glycosylphosphatidylinositol (GPI). The cell membrane signaling peptide may comprise an amino acid sequence selected from any one of SEQ ID NOS: 1-4 or 8, or an amino acid sequence having at least 80% identity thereto.

[0008] The cell membrane anchor protein of the one or more cell of the first mammalian species may comprise at least one transmembrane domain; localize the antigen-binding protein to cell surface of the cell of a first mammalian species; and/or is glycosylated or is not glycosylated. The cell membrane anchor protein of the one or more cell of the first mammalian species may comprise one or more transmembrane domain selected from a CD8 transmembrane domain, ICAM1 transmembrane domain, E-cadherin transmembrane domain, CLDN6 transmembrane domain, ITGB 1 transmembrane domain, ITGB2 transmembrane domain, JAM-B transmembrane domain, NCAM-1 transmembrane domain, MUC-4 transmembrane domain, PDGFRA transmembrane domain, or fragment thereof each. The cell membrane anchor protein of the one or more cell of the first mammalian species may selected from CD8, ICAM1, E-Cad, CLDN6, ITGB1, ITGB2, JAM-B, NCAM-1, MUC-4, PDGFRA, or a fragment thereof each. The cell membrane anchor protein of the one or more cell of the first mammalian species may comprise an amino acid sequence comprising the sequence set forth in any one of SEQ ID NO:9-13, or an amino acid sequence having at least 80% identity thereto.

[0009] The antigen-binding protein of the one or more cell of a first mammalian species may comprise an antibody or antigen-binding fragment thereof, optionally wherein the antigen-binding protein comprises a fragment variable domain (FV); a fragment antigen binding (Fab) domain; a Fab′; a (Fab′) 2; a half-IgG; a single-chain fragment variable domain (scFv); a diabody (di-scFv); a triabody (tri-scFv)′ a single chain Fab (scFab); a minibody; an scFv-Fc, or a nanobody.

[0010] The antigen-binding protein of the one or more cell of a first mammalian species may be a nanobody, optionally wherein the nanobody may be selected from an anti-GFP nanobody, further optionally wherein the anti-GFP nanobody may be selected from vhhGFP4, LaG-2, LaG-3, LaG-5, LaG-6, LaG-8, LaG-9, LaG-10, LaG-11, LaG-12, LaG-17, LaG-18, LaG-43, LaG-19, LaG-21, LaG-42, LaG-24, LaG-26, LaG-27, LaG-29, LaG-30, LaG-35, LaG-37, LaG-41, LaM-2, LaM-3, LaM-4, LaM-6, or LaM-8. The antigen-binding protein of the one or more cell of a first mammalian species may comprise the amino acid sequence set forth in any one of SEQ ID NOS: 9-36, or a sequence having at least 80% identity thereto.

[0011] The antigen-binding protein, cell membrane signaling peptide, and/or a cell membrane anchor protein of the cell of the first mammalian species may be connected with linker, optionally wherein the linker comprises the amino acid sequence set forth in any one of SEQ ID NOS: 5-7.

[0012] The antigen of the one or more cell of the second mammalian species may be endogenous to the second mammalian species, optionally may be endogenous to the first and second mammalian species.

[0013] The antigen of the one or more cell of the second mammalian species may be exogenous to the second mammalian species, optionally may be exogenous to the first and second mammalian species.

[0014] The one or more cell of the second mammalian species may comprise an exogenous nucleic acid encoding the exogenous antigen; and a cell membrane signaling peptide and/or a cell membrane anchor protein. The exogenous antigen may be selected from mCherry, or an isoform thereof; or green-fluorescent protein, or isoform thereof, optionally wherein the exogenous antigen comprises the amino acid sequence set forth in any one of SEQ ID NOS: 14-16, or a sequence having at least 80% identity thereto. The cell membrane signaling peptide of the one or more cell of a second mammalian species may comprise at least one transmembrane domain; bind to a signal recognition protein (SRP); target the antigen to the endoplasmic reticulum (ER) membrane; introduce a lipid anchor; and/or localize the antigen to the cell membrane.

[0015] The cell membrane signaling peptide of the one or more cell of the second mammalian species may introduce a lipid anchor, optionally wherein the lipid anchor is glycosylphosphatidylinositol (GPI). The cell membrane signaling peptide may comprise an amino acid sequence selected from any one of SEQ ID NOS: 1-4 or 8, or an amino acid sequence having at least 80% identity thereto.

[0016] The cell membrane anchor protein of the one or more cell of a second mammalian species may comprise at least one transmembrane domain; localize the antigen to cell surface of the cell of a second mammalian species; and/or is glycosylated or is not glycosylated.

[0017] The cell membrane anchor protein of the one or more cell of a second mammalian species may comprise one or more transmembrane domain selected from a CD8 transmembrane domain, ICAM1 transmembrane domain, E-cadherin transmembrane domain, CLDN6 transmembrane domain, ITGB1 transmembrane domain, ITGB2 transmembrane domain, JAM-B transmembrane domain, NCAM-1 transmembrane domain, MUC-4 transmembrane domain, PDGFRA transmembrane domain, or fragment thereof each. The cell membrane anchor protein of the one or more cell of the second mammalian species may be selected from CD8, ICAM1, E-cad, CLDN6, ITGB1, ITGB2, JAM-B, NCAM-1, MUC-4, PDGFRA, or a fragment thereof each. The cell membrane anchor protein of the one or more cell of the second mammalian species may comprise an amino acid sequence comprising the sequence set forth in any one of SEQ ID NO:9-13, or an amino acid sequence having at least 80% identity thereto.

[0018] The antigen-binding protein, cell membrane signaling peptide, and/or a cell membrane anchor protein of the cell of the second mammalian species may be connected with linker, optionally wherein the linker comprises the amino acid sequence set forth in any one of SEQ ID NOS: 5-7.

[0019] The one or more cell of the first mammalian species may a human cell and the one or more cell of the second mammalian species may be a cell of a non-human mammalian species.

[0020] The one or more cell of the first mammalian species may be a cell of a non-human mammalian species and the one or more cell of the second mammalian species may be a human cell.

[0021] The one or more cell of the non-human mammalian species may be selected from: a rodent cell, optionally selected from a mouse cell or rat cell; a non-human primate cell, optionally selected from a monkey cell, chimpanzee cell, gorilla cell, orangutan cell, rhesus macaque cell, marmoset cell or bonobo cell); or an ungulate cell, optionally selected from a pig cell, horse cell, cattle cell, sheep cell, goat cell, or donkey cell.

[0022] The one or more cell of the first mammalian species or the one or more cell of the second mammalian species may be a stem cell, optionally an embryonic stem cell. The one or more cell of the first mammalian species or the one or more cell of the second mammalian species may be an induced pluripotent stem cell (iPSC), embryonic stem cell (ESC), or epiblast-derived stem cell (EpiSCs). The one or more cell of the first mammalian species may be an iPSC and the one or more cell of the second mammalian species is an ESC, or the one or more cell of the first mammalian species may be an ESC and the one or more cell of the second mammalian species is an iPSC. The one or more cell of the non-human mammalian species may be organogenesis-disabled. The population of cells may cells may be a chimeric embryo or a chimeric blastocyst.

[0023] Provided herein is a method of generating an organ, organoid, or tissue mass comprising of a first mammalian species, the method comprising the steps of: providing a population of one or more cell of the first mammalian species comprising an antigen-recognition domain at the cell membrane, and providing a population of one or more cell of a second mammalian species comprising cells expressing an antigen at the cell membrane; or providing a population of one or more cell of the first mammalian species comprising an antigen at the cell membrane, and providing a population of one or more cell of a second mammalian species comprising cells expressing an antigen-binding protein at the cell membrane, whereby an interspecies chimera is generated, whereby an interspecies chimera is generated, and culturing the interspecies chimera to under conditions that allow the interspecies chimera to develop into the organ, organoid, or tissue mass of the cell of a first mammalian species. The first mammalian species may be a human, and the second mammalian species may be a non-human mammalian. The interspecies chimera may be a chimeric blastocyst.

[0024] Provided herein is an organ, organoid, or tissue, which is developed from a population of cells as described herein, or by a method as described herein. The organ, organoid, or tissue mass may be a kidney, liver, heart, lung, pancreas, muscle, stomach, intestine, spleen, bladder, reproductive organs, bone marrow, or skin. The organ, organoid, or tissue may be a human organ, human organoid, or human tissue, and optionally may comprise more than 90% human cells.

[0025] Other technical features may be readily apparent to one skilled in the art from the following figures, descriptions, and claims.

### BRIEF DESCRIPTION OF THE DRAWINGS

[0026] The patent or application file contains at least one drawing executed in color. Copies of this patent or patent application publication with color drawing(s) will be provided by the Office upon request and payment of the necessary fee.

[0027] Aspects of the present disclosure are illustrated by way of example in which like reference numerals indicate similar elements and in which:

[0028] FIGS. 1A-1U shows that cell adhesion is a component of the xenogeneic barrier and can be overcome in vitro using a synthetic nanobody adhesion system. FIG. 1A shows in vitro cultured mouse embryos at Day 1 and Day 3 after injection of hPSCs (red fluorescent signal). FIG. 1B shows immunofluorescence staining for tight junction (ZO1) and adherens junction (E-Cadherin) markers in 2D co-cultured mouse and human PSCs. Human and mouse PSCs were distinguished from one another by red fluorescent labeling of hPSCs (red fluorescent channel not shown) and the larger size of hPSCs as compared to mPSCs. FIG. 1C shows representative electron micrographs of co-cultured mouse and human PSCs. Mouse and human PSCs were distinguished via correlative light-electron microscopy (CLEM), which involves taking fluorescent images of fluorescently labeled hPSCs and mPSCs co-cultured in gridded plates, followed by correlation of colony location and morphology between these images and subsequent electron micrographs. FIG. 1D shows a schematic of the doublet flow cytometry assay. This assay involves combining 200,000 cells each from two PSC lines expressing different fluorescent markers (which may be from the same or different species) then co-culturing these cell lines in suspension on an orbital shaker set to 80 rpm for one hour. The cell suspension is then analyzed via flow cytometry, with a gating strategy that excludes both single cells and larger aggregates to focus only on doublets. Cell doublets with both red and green fluorescence are assumed to be composed of one cell from each line. FIG. 1E depicts results of an interspecies doublet assay using flow cytometry, showing a significant reduction in cell adhesion (as measured by the percentage of dual-colored doublets) between rodent and human cells as compared to adhesion between cells of the same or closely related species (n=6 independent biological replicates). FIG. 1F depicts results of a mouse-human doublet assay, which was performed between mouse and human cells cultured in the naïve state (4CL medium), in the primed state (NBFR medium), and after 7 days of random differentiation (N2B27+10% FBS) (n=5 biological replicates). FIG. 1G shows a schematic of the 3D co-aggregation assay, which involves combining 7500 cells each from two fluorescently labeled PSC lines in an Aggrewell 800 plate. This plating density generates aggregates of 25+25 cells per microwell. Cells are co-cultured in the Aggrewell plate for 24 hours and allowed to form small aggregates, at which point they are imaged in situ to determine the percentage of intermixed and segregated aggregates. FIG. 1H shows representative images of the interspecies 3D co-aggregation assay between mouse-mouse, human-human, and mouse-human cell combinations. FIG. 1I shows quantification of the interspecies co-aggregation assay, measuring the percentage of aggregates containing significant intermixing between cell lines (n=5 biological replicates). FIG. 1J shows a schematic of wash assay protocol. 100,000 red fluorescent cells of each PSC line of interest are plated into Matrigel-coated cell culture inserts in an 8-well ibidi chamber slide (the remainder of the chamber slide is uncoated) and allowed to generate a confluent monolayer. The following day, the inserts are removed and 100,000 membrane-GFP-expressing mPSCs are added to each well of the culture chamber. After 30 minutes, the chambers are washed with PBS to remove non-adherent cells, then fixed in 4% PFA and imaged on a confocal microscope. FIG. 1K shows representative images of the wash assay showing red fluorescent mEpiSC and hPSC monolayers with attached GFP-GPI mEpiSCs after washing.

[0029] FIG. 1L shows quantification of interspecies wash assay results by measuring the average number of attached GFP-GPI mEpiSCs per mm (Chen et al., Proc Natl Acad Sci (1993) 90, 4528-4532) 2 (n=8 biological replicates). FIG. 1M depicts the strategy for increasing adhesion between mouse and human PSCs via binding between membrane-localized nanobody and antigen. FIG. 1N shows a summary of results from the mouse-human doublet flow cytometry assay, showing a significantly higher percentage of dual-color doublets between Mouse+Nano-GPI hiPSCs and Mouse+Nano-CD8 hESCs as compared to Mouse+WT hiPSCs (n=6 biological replicates). FIG. 1O shows representative images of the 3D co-aggregation assay between mouse and human PSCs, with and without nanobody adhesion. FIG. 1P shows a summary of 3D co-aggregation assay results for mouse-human aggregation. There were significantly more intermixed aggregates in the Mouse+Nano-GPI hiPSC and Mouse+Nano-CD8 hESC conditions than the Mouse+WT hiPSC condition, n=6 independent biological replicates. FIG. 1Q shows representative images of the wash assay showing WT hiPSC, Nano-GPI hiPSC, and Nano-CD8 hESC monolayers with attached GFP-GPI mEpiSCs. FIG. 1R shows a summary of wash assay results, showing a significant increase in attached GFP-GPI-mEpiSCs on Nano-GPI hiPSC and Nano-CD8 hESC monolayers as compared to WT hiPSC monolayers (n=5 biological replicates). FIG. 1S shows representative images of the lumen formation assay, which measures the ability of human PSCs to undergo polarization and contribute to the formation of a lumen in mixed mouse-human aggregates. Aggregates were formed in a 10% Matrigel overlay and stained with phalloidin to mark actin accumulation on the apical surface of cells. FIG. 1T shows quantification of the average number of human cells in each chimeric aggregate during the lumen formation assay. FIG. 1U shows average percentage of polarized human cells in chimeric aggregates. Polarized cells were identified by apical actin accumulation and direct contact with the central lumen.

[0030] FIGS. 2A-2H show that nanobody adhesion significantly increases human PSC contribution to interspecies chimeric embryos at mid-gestation. FIG. 2A shows representative fluorescent images of an E12.5 intraspecies chimeric embryo generated by injection of Nano-GPI mESCs into GFP-GPI mouse blastocysts. Chimeric embryos appeared grossly normal at mid-gestation. FIG. 2B shows intraspecies chimeric embryos with Nano-GPI mESC donor cells were able to give rise to live-born pups, shown here on postnatal day 8. Donor cells were derived from the C57BL/6 mouse strain, so chimera contribution can be visualized by coat color change. FIG. 2C depicts a schematic of interspecies chimera experiments involving injection of Nano-GPI hiPSCs into GFP-GPI mouse blastocysts, followed by embryo transfer to a surrogate mother and harvesting embryos for analysis at E8.5. Embryos were then analyzed via immunohistochemistry and genomic qPCR for human-specific mitochondrial markers. FIG. 2D show fluorescence stereomicroscopy of a representative interspecies chimeric embryo at E8.5. Donor cells were Nano-GPI hiPSCs labeled with nuclear mKO fluorescence. GFP channel not shown. FIG. 2E shows mitochondrial genomic qPCR quantification of human contribution to representative E8.5 chimeric embryos with primers recognizing a human-specific mitochondrial DNA sequence, as compared to a standard curve of known human/mouse cell mixtures. FIG. 2F shows percentage of Nano-GPI hiPSC interspecies chimeric embryos per embryo transfer above the positive qPCR threshold (equivalent to 1:10,000 human cells) at E8.5, as compared to the percentage of positive control hiPSC chimeric embryos per transfer. FIG. 2G shows comparison of the average percentage of human DNA per embryo between Nano-GPI hiPSC chimeric embryos and control hiPSC chimeric embryos (n=37 control hiPSC embryos and n=43 Nano-GPI hiPSC embryos). Percentage of human DNA was calculated using a linear regression equation derived from the standard curve of human/mouse cell ratios. FIG. 2H shows immunohistochemistry (IHC) staining of frozen sections from E8.5 Nano-GPI hiPSC interspecies chimeric embryos. Tissue sections were co-stained with ectoderm/mesoderm/endoderm markers and an antibody recognizing a human-specific mitochondrial antigen.

[0031] FIGS. 3A-3Q show expression of a membrane-localized anti-GFP nanobody to overcome the interspecies adhesion barrier, related to FIGS. 1A-1U. FIG. 3A depicts a proposed mechanism for elimination of human cells in chimeric embryos due to a lack of cell adhesion during epiblast formation. FIG. 3B shows representative images of the interspecies 3D co-aggregation assay between primate species including human, chimpanzee, and rhesus macaque. FIG. 3C shows quantification of the interspecies co-aggregation assay between chimpanzee, rhesus macaque, and human (n=5 biological replicates). FIG. 3D shows representative images of the interspecies 3D co-aggregation assay between pig and human. FIG. 3E shows quantification of the interspecies co-aggregation assay between pig and human (n=6 biological replicates). FIG. 3F depicts the gating strategy for the doublet flow cytometry assay. FIG. 3G shows results of the doublet flow cytometry assay with human, chimpanzee, and rhesus macaque PSCs, showing no significant interspecies differences in adhesion on a single-cell level (n=5 biological replicates). FIG. 3H depicts a schematic of GPI and CD8 membrane-anchoring strategies for localization and orientation of an anti-GFP nanobody. FIG. 2I shows immunostaining with an anti-camelid antibody showing membrane localization of nanobody expression. FIG. 3J shows GFP binding assay demonstrating that membrane-embedded nanobody is capable of binding to free-floating GFP in the media after treatment with purified GFP protein. FIG. 3K shows that nanobody expression does not affect mESC doubling time (n=3 independent biological replicates.) FIG. 3L shows immunostaining of pluripotency factors OCT4 and SOX2 in Nano-GPI and Nano-CD8 mESCs. FIG. 3M shows teratoma formation assay showing that Nano-GPI and Nano-CD8 mESCs can differentiate into cells derived from all three germ layers after injection into immunodeficient mice. FIG. 3N shows representative results of the doublet flow cytometry assay for Mouse+Mouse, Mouse+WT hPSC, Mouse+Nano-GPI hPSC, and Mouse+Nano-CD8 hPSC conditions. FIG. 3O shows representative images of the 3D co-aggregation assay performed between human and pig PSCs with and without Nano-GPI expression in the human cells. FIG. 3P shows quantification of the human-pig 3D co-aggregation assay, showing an increase in highly intermixed aggregates in the Nano-GPI condition (n=6 biological replicates). FIG. 3Q shows results of the doublet flow cytometry assay performed between human-human, pig-pig, and human-pig with and without Nano-GPI expression.

[0032] FIGS. 4A-4I depict further details of intraspecies and interspecies chimera formation, related to FIGS. 2A-2H. FIG. 4A shows fluorescence microscopy images of P0 pups from the GFP-GPI mouse strain demonstrating strong GFP expression in all tissues. FIG. 4B shows representative fluorescence microscopy images of additional E12.5 intraspecies chimeric embryos generated with Nano-GPI mESC donor cells. FIG. 4C shows immunohistochemistry (IHC) staining of frozen sections from E12.5 intraspecies chimeric embryos generated with Nano-GPI mESC donor cells. Tissue sections were co-stained with ectoderm/mesoderm/endoderm markers and an anti-mKO antibody to mark donor cell contribution. FIG. 4D shows fluorescent images of additional E8.5 interspecies chimeric embryos generated by injecting Nano-GPI hiPSCs into GFP-GPI mouse blastocysts. GFP channel not shown. FIG. 4E shows mitochondrial genomic qPCR with primers recognizing a second human-specific mitochondrial sequence in representative E8.5 Nano-GPI hiPSC chimeric embryos, as compared to known human/mouse cell ratios. FIG. 4F shows percentage of Nano-GPI hiPSC chimeric embryos per embryo transfer above the positive qPCR threshold (equivalent to 1:10,000 human cells) for human contribution at E8.5 as compared to the percentage of positive control hiPSC chimeric embryos, calculated using Mitochondrial Element 2.

[0033] FIG. 4G shows average percentage of human DNA per embryo in control and Nano-GPI hiPSC interspecies chimeric embryos, calculated using Mitochondrial Element 2 qPCR. FIG. 4H shows representative images of E8.5 intraspecies chimeric embryos generated by heterochronic injection of primed Nano-GPI mEpiSCs into blastocyst-stage GFP-GPI embryos. GFP channel not shown.

[0034] FIG. 41 shows immunohistochemistry (IHC) staining of frozen sections from E8.5 intraspecies chimeric embryos generated with stage-mismatched Nano-GPI mEpiSC donor cells. Tissue sections were co-stained with ectoderm/mesoderm/endoderm markers and an anti-mKO antibody to mark donor cell contribution.

[0035] FIGS. 5A-5B show that cytoskeleton-bound cell adhesion proteins (e.g., ICAM1) efficiently facilitate binding and cell adhesion. FIG. 5A shows a schematic diagram of wash assay adapted to verify ICAM1 as a cell membrane anchor protein. FIG. 5B shows GFP signal after the wash assay, with or without GFP nanobody expression in mESCs.

### DETAILED DESCRIPTION

[0036] The following detailed description references the accompanying drawings that illustrate various aspects of the present disclosure. The drawings and description are intended to describe aspects and aspects of the present disclosure in sufficient detail to enable those skilled in the art to practice the present disclosure. Other components can be utilized and changes can be made without departing from the scope of the present disclosure. The following description is, therefore, not to be taken in a limiting sense.

[0037] The generation of transplantable organs to address the global shortage of human donors is a key objective in regenerative medicine. Interspecies blastocyst complementation is a promising technique, but its effectiveness is hampered by limited human cell integration into animal chimeras due to various xenogeneic barriers. The current disclosure is based on the unexpected discovery that differential cell-cell adhesion, crucial for tissue separation and boundary formation during development, is a major barrier to interspecies chimerism. Using a series of interspecies pluripotent stem cell (PSC) cell adhesion assays, it is demonstrated here that this barrier is more pronounced between evolutionarily distant species and during primed pluripotency. To overcome this barrier, the current disclosure takes a synthetic biology approach, using membrane-localized antigen and antigen-binding protein interactions to enhance adhesion between mouse and human PSCs in vitro. Importantly, these studies demonstrate that a synthetic cell adhesion strategy significantly increases the chimeric contribution of human cells in mouse embryos in vivo. This approach has the potential to broaden the scope of interspecies organogenesis.

[0038] In an aspect, the current disclosure encompasses the design of a range of interspecies co-culture assays to investigate cell adhesion among PSCs. These include single-cell level analysis using doublet flow cytometry, and more complex structures like aggregates and lumens that mimic natural cell assemblies. Utilizing these assays, it is shown herein that cell adhesion barriers are present between evolutionarily distant species. Without being bound to theory, these barriers are notably more evident during primed pluripotency compared to naïve pluripotency and early differentiation.

[0039] In an aspect, the current disclosure encompasses synthetic biology techniques to artificially enhance cell adhesion. This innovative cell adhesion system employs engineered cells to display antigen-binding proteins (e.g., nanobodies) and their corresponding antigens on the outer plasma membrane. This modification markedly improved the interaction between human and mouse PSCs in vitro, and significantly boosted the integration of human PSCs into mouse embryos, enhancing chimerism. This validates the effectiveness of the disclosed methods in promoting adhesion among cells that typically do not adhere well to one another. This study also takes this approach a step further by applying it to enhance adhesion between pluripotent cells of different species (e.g., human and non-human). This enhancement significantly improves the cell adhesion between PSCs from different species and the chimeric contribution of hPSCs to mouse embryos. The enhanced cell adhesion further improves survival of in interspecies chimeric embryos, for example human cells in mouse-human chimeric embryos.

### I. Terminology

[0040] The phraseology and terminology employed herein are for the purpose of description and should not be regarded as limiting. For example, the use of a singular term, such as, “a” is not intended as limiting of the number of items. Also, the use of relational terms such as, but not limited to, “top,” “bottom,” “left,” “right,” “upper,” “lower,” “down,” “up,” and “side,” are used in the description for clarity in specific reference to the figures and are not intended to limit the scope of the present disclosure or the appended claims.

[0041] Any term of degree such as, but not limited to, “substantially” as used in the description and the appended claims, should be understood to include an exact, or a similar, but not exact configuration. For example, “a substantially planar surface” means having an exact planar surface or a similar, but not exact planar surface. Similarly, the terms “about” or “approximately,” as used in the description and the appended claims, should be understood to include the recited values or a value that is three times greater or one third of the recited values. For example, about 3 mm includes all values from 1 mm to 9 mm, and approximately 50 degrees includes all values from 16.6 degrees to 150 degrees. For example, they can refer to less than or equal to ±5%, such as less than or equal to ±2%, such as less than or equal to #1%, such as less than or equal to ±0.5%, such as less than or equal to ±0.2%, such as less than or equal to ±0.1%, such as less than or equal to ±0.05%.

[0042] The terms “comprising,” “including” and “having” are used interchangeably in this disclosure. The terms “comprising,” “including” and “having” mean to include, but not necessarily be limited to the things so described.

[0043] The terms “or” and “and/or,” as used herein, are to be interpreted as inclusive or meaning any one or any combination. Therefore, “A, B or C” or “A, B and/or C” mean any of the following: “A,” “B” or “C”; “A and B”; “A and C”; “B and C”; “A, B and C.” An exception to this definition will occur only when a combination of elements, functions, steps or acts are in some way inherently mutually exclusive.

[0044] Unless defined otherwise, all technical and scientific terms used herein have the meaning commonly understood by a person skilled in the art to which this disclosure belongs. The following references provide one of skill with a general definition of many of the terms used in this disclosure: Singleton et al., Dictionary of Microbiology and Molecular Biology (2nd ed. 1994); The Cambridge Dictionary of Science and Technology (Walker ed., 1988); The Glossary of Genetics, 5th Ed., R. Rieger et al. (eds.), Springer Verlag (1991); and Hale & Marham, The Harper Collins Dictionary of Biology (1991), all of which are incorporated by reference herein. As used herein, the following terms have the meanings ascribed to them below, unless specified otherwise.

[0045] The phraseology and terminology employed herein are for the purpose of description and should not be regarded as limiting. When introducing elements of the present disclosure or the preferred aspects(s) thereof, the articles “a”, “an”, “the” and “said” are intended to mean that there are one or more of the elements. The terms “comprising”, “including” and “having” are intended to be inclusive and mean that there may be additional elements other than the listed elements. Wherever the terms “comprising” or “including” are used, it should be understood the disclosure also expressly contemplates and encompasses additional aspects “consisting of” the disclosed elements, in which additional elements other than the listed elements are not included.

[0046] The term “about” or “approximately,” as used herein, can mean within an acceptable error range for the particular value as determined by one of ordinary skill in the art, which will depend in part on how the value is measured or determined, e.g., the limitations of the measurement system. For example, “about” can mean within 1 or more than 1 standard deviation, per the practice in the given value. Where particular values are described in the application and claims, unless otherwise stated the term “about” can mean an acceptable error range for the particular value, such as 10% of the value modified by the term “about.” As used herein, the term “about,” can mean relative to the recited value, e.g., amount, dose, temperature, time, percentage, etc., +10%, +9%, +8%, +7%, +6%, +5%, +4%, +3%, +2%, or +1%.

[0047] Further, as the present disclosure is susceptible to aspects of many different forms, it is intended that the present disclosure be considered as an example of the principles of the present disclosure and not intended to limit the present disclosure to the specific aspects shown and described. Any one of the features of the present disclosure may be used separately or in combination with any other feature. References to the terms “aspect,” “aspects,” and/or the like in the description mean that the feature and/or features being referred to are included in, at least, one aspect of the description. Separate references to the terms “aspect,” “aspects,” and/or the like in the description do not necessarily refer to the same aspect and are also not mutually exclusive unless so stated and/or except as will be readily apparent to those skilled in the art from the description. For example, a feature, structure, process, step, action, or the like described in one aspect may also be included in other aspects but is not necessarily included. Thus, the present disclosure may include a variety of combinations and/or integrations of the aspects described herein. Additionally, all aspects of the present disclosure, as described herein, are not essential for its practice. Likewise, other systems, methods, features, and advantages of the present disclosure will be, or become, apparent to one with skill in the art upon examination of the figures and the description. It is intended that all such additional systems, methods, features, and advantages be included within this description, be within the scope of the present disclosure, and be encompassed by the claims.

[0048] The term “nucleic acid” or “polynucleotide” refers to deoxyribonucleic acids (DNA) or ribonucleic acids (RNA) and polymers thereof in either single- or double-stranded form. Unless specifically limited, the term encompasses nucleic acids containing known analogues of natural nucleotides that have similar binding properties as the reference nucleic acid and are metabolized in a manner similar to naturally occurring nucleotides. Unless otherwise indicated, a particular nucleic acid sequence also implicitly encompasses conservatively modified variants thereof (e.g., degenerate codon substitutions), alleles, orthologs, SNPs, and complementary sequences as well as the sequence explicitly indicated. Specifically, degenerate codon substitutions may be achieved by generating sequences in which the third position of one or more selected (or all) codons is substituted with mixed-base and/or deoxyinosine residues See, e.g., Batzer et al., Nucleic Acid Res. 19:5081 (1991), the disclosure of which is incorporated in its entirety herein.

[0049] The terms “peptide,” “polypeptide,” and “protein” are used interchangeably, and refer to a compound comprised of amino acid residues covalently linked by peptide bonds. A protein or peptide must contain at least two amino acids, and no limitation is placed on the maximum number of amino acids that can comprise a protein's or peptide's sequence. Polypeptides include any peptide or protein comprising two or more amino acids joined to each other by peptide bonds. As used herein, the term refers to both short chains, which also commonly are referred to in the art as peptides, oligopeptides and oligomers, for example, and to longer chains, which generally are referred to in the art as proteins, of which there are many types. “Polypeptides” include, for example, biologically active fragments, substantially homologous polypeptides, oligopeptides, homodimers, heterodimers, variants of polypeptides, modified polypeptides, derivatives, analogs, fusion proteins, among others. A polypeptide includes a natural peptide, a recombinant peptide, or a combination thereof.

[0050] Within the context of the application a protein is represented by an amino acid sequence and correspondingly a nucleic acid molecule or a polynucleotide represented by a nucleic acid sequence. Identity and similarity between sequences: throughout this application, each time one refers to a specific amino acid sequence, one may replace it by: a polypeptide represented by an amino acid sequence comprising a sequence that has at least about 80% sequence identity or similarity with the recited amino acid sequence. Another preferred level of sequence identity or similarity is about 85%. Another preferred level of sequence identity or similarity is about 90%. Another preferred level of sequence identity or similarity is about 95%. Another preferred level of sequence identity or similarity is about 98%. Another preferred level of sequence identity or similarity is about 99%.

[0051] Each amino acid sequence described herein by virtue of its identity or similarity percentage with a given amino acid sequence respectively has in a further preferred aspect an identity or a similarity of at least 80%, at least 81%, at least 82%, at least 83%, at least 84%, at least 85%, at least 86%, at least 87%, at least 88%, at least 89%, at least 90%, at least 91%, at least 92%, at least 93%, at least 94%, at least 95%, at least 96%, at least 97%, at least 98%, at least 99% or 100% with the given nucleotide or amino acid sequence, respectively. The terms “homology”, “sequence identity” and the like are used interchangeably herein. Sequence identity is described herein as a relationship between two or more amino acid (polypeptide or protein) sequences or two or more nucleic acid (polynucleotide) sequences, as determined by comparing the sequences. In a preferred aspect, sequence identity is calculated based on the full length of two given SEQ ID NO's or on a part thereof. Part thereof preferably means at least 50%, 60%, 70%, 80%, 90%, or 100% of both SEQ ID NO's. In the art, “identity” also refers to the degree of sequence relatedness between amino acid or nucleic acid sequences, as the case may be, as determined by the match between strings of such sequences. The degree of sequence identity between two sequences can be determined, for example, by comparing the two sequences using computer programs commonly employed for this purpose, such as global or local alignment algorithms. Non-limiting examples include BLASTp, BLASTn, Clustal W, MAFFT, Clustal Omega, AlignMe, Praline, GAP, BESTFIT, or another suitable method or algorithm. A Needleman and Wunsch global alignment algorithm can be used to align two sequences over their entire length or part thereof (part thereof may mean at least 50%, 60%, 70%, 80%, 90% of the length of the sequence), maximizing the number of matches and minimizes the number of gaps. Default settings can be used and preferred program is Needle for pairwise alignment (in an aspect, EMBOSS Needle 6.6.0.0, gap open penalty 10, gap extent penalty: 0.5, end gap penalty: false, end gap open penalty: 10, end gap extent penalty: 0.5 is used) and MAFFT for multiple sequence alignment (in an aspect, MAFFT v7Default value is: BLOSUM62 [b162], Gap Open: 1.53, Gap extension: 0.123, Order: aligned, Tree rebuilding number: 2, Guide tree output: ON [true], Max iterate: 2, Perform FFTS: none is used).

[0052] “Similarity” between two amino acid sequences is determined by comparing the amino acid sequence and its conserved amino acid substitutes of one polypeptide to the sequence of a second polypeptide. Similar algorithms used for determination of sequence identity may be used for determination of sequence similarity. Optionally, in determining the degree of amino acid similarity, the skilled person may also take into account so-called conservative amino acid substitutions. As used herein, “conservative” amino acid substitutions refer to the interchangeability of residues having similar side chains.

[0053] For example, a group of amino acids having aliphatic side chains is glycine, alanine, valine, leucine, and isoleucine; a group of amino acids having aliphatic-hydroxyl side chains is serine and threonine; a group of amino acids having amide-containing side chains is asparagine and glutamine; a group of amino acids having aromatic side chains is phenylalanine, tyrosine, and tryptophan; a group of amino acids having basic side chains is lysine, arginine, and histidine; and a group of amino acids having sulphur-containing side chains is cysteine and methionine. Preferred conservative amino acids substitution groups are: valine-leucine-isoleucine, phenylalanine-tyrosine, lysine-arginine, alanine-valine, and asparagine-glutamine. Substitutional variants of the amino acid sequence disclosed herein are those in which at least one residue in the disclosed sequences has been removed and a different residue inserted in its place. Preferably, the amino acid change is conservative. Preferred conservative substitutions for each of the naturally occurring amino acids are as follows: Ala to Ser; Arg to Lys; Asn to Gln or His; Asp to Glu; Cys to Ser or Ala; Gln to Asn; Glu to Asp; Gly to Pro; His to Asn or Gln; Ile to Leu or Val; Leu to Ile or Val; Lys to Arg; Gln or Glu; Met to Leu or Ile; Phe to Met, Leu or Tyr; Ser to Thr; Thr to Ser; Trp to Tyr; Tyr to Trp or Phe; and Val to Ile or Leu.

[0054] An “individual” or “subject,” as used interchangeably herein, is a mammal. In certain aspects, the individual or subject is a human.

### II. Engineering of cell for enhanced cellular adhesion

[0055] In an aspect, provided herein is a population of cells, comprising one or more cell of a first mammalian species and one or more cell of a second mammalian species, wherein the one or more cell of the first mammalian species comprises an exogenous nucleic acid encoding an antigen-binding protein that specifically binds to an antigen on the cell of a second mammalian species. The antigen may be exogenous or endogenous to the cell of a second mammalian species.

[0056] In an aspect, provided herein is a population of cells, comprising one or more cell of a first mammalian species and one or more cell of a second mammalian species, wherein the one or more cell of a second mammalian species comprises an exogenous nucleic acid encoding an antigen-binding protein that specifically binds to an antigen on a cell of a first mammalian species. The antigen may be exogenous or endogenous to the cell of a first mammalian species.

### (a) Cell Types

[0057] A cell as described herein (e.g., as in a population of cells comprising one or more cells, or a method comprising a cell or population of cells, as described herein) may be a cell of a first mammalian species or a cell of a second mammalian species. The first mammalian species and second mammalian species will be different species.

[0058] A cell of a first mammalian species, as described herein, may be a stem cell. In some embodiments, the cell of the first mammalian species may be selected from a totipotent stem cell, pluripotent stem cell, multipotent stem cell, oligopotent stem cell, or unipotent stem cell. The totipotent stem cell of the first mammalian species may be a blastomere or 4-cell embryo. The pluripotent stem cell of the first mammalian species may be an embryonic stem cell or an induced stem cell. The pluripotent stem cell of the first mammalian species may be naïve or primed. The pluripotent stem cell of the first mammalian species may bean epiblast-derived stem cell. A multipotent stem cell of a first mammalian species may be an endothelial stem cell. The unipotent cell of a first mammalian species as described herein may be a progenitor cell. The human progenitor cell may be selected from a kidney progenitor cell, hepatic progenitor cell, cardiac progenitor cell, intestinal progenitor cell, lung progenitor cell, epidermal progenitor cell, muscle progenitor cell, mesenchymal progenitor cell, olfactory progenitor cell, hematopoietic progenitor cell, neural progenitor cell, or any progenitor cell of the desired organ, organoid, or tissue.

[0059] A cell of a second mammalian species, as described herein, may be a stem cell. In some embodiments, the cell of the second mammalian species may be selected from a totipotent stem cell, pluripotent stem cell, multipotent stem cell, oligopotent stem cell, or unipotent stem cell. The totipotent stem cell of the second mammalian species may be a blastomere or 4-cell embryo. The pluripotent stem cell of the second mammalian species may be an embryonic stem cell or an induced stem cell. The pluripotent stem cell of the second mammalian species may be naïve or primed. The pluripotent stem cell of the second mammalian species may bean epiblast-derived stem cell. A multipotent stem cell of a second mammalian species may be an endothelial stem cell. The unipotent cell of a second mammalian species as described herein may be a progenitor cell. The human progenitor cell may be selected from a kidney progenitor cell, hepatic progenitor cell, cardiac progenitor cell, intestinal progenitor cell, lung progenitor cell, epidermal progenitor cell, muscle progenitor cell, mesenchymal progenitor cell, olfactory progenitor cell, hematopoietic progenitor cell, neural progenitor cell, or any progenitor cell of the desired organ, organoid, or tissue.

[0060] The one or more cell of a second mammalian species may be organogenesis-disabled, for example is genetically modified to have a dysorganogenetic phenotype or trait. An organogenesis-disabled cell may comprise a disabling of one or more host genes critical for a particular organ's development. The organogenesis-disabled cell of a second mammalian species is preferably completely organogenesis-disabled, but may be partially organogenesis-disabled. An organogenesis-disabled cell may develop an empty organ niche (e.g., developmental niche) during organogenesis. For example, the cell of a second mammalian species may be anephrogenic, ahepatogenic, apancreatic (e.g., lack the ability to develop a kidney, liver, or pancreas), or lack the ability to develop another organ. A population of cells comprising one or more organogenesis-disabled cell of a second mammalian species may have its dysorganogenetic phenotype corrected by complementation with a cell of a second mammalian species comprising an organogenetic phenotype for the disabled organ. In other words, the cell of a second mammalian species may fill the developmental niche for a particular organ that has been disabled in the cell of a second mammalian species, or the cell of a second mammalian species may be organogenesis-enabled.

[0061] In an aspect the population of cells is a chimeric embryo. The chimeric embryo may be at any stage of embryonic development, wherein the stage is selected from a blastocyst stage, implantation stage, gastrulation stage, neurulation stage, organogenesis stage, or fetal development stage. In some embodiments, the population of cells is a chimeric blastocyst.

[0062] A chimeric embryo may be an interspecies chimeric embryo. For example, a chimeric embryo may be a developing embryo comprising one or more cells of a second mammalian species and one or more cells of another mammalian species. The chimeric embryo may comprise one or more cells from at least a second mammalian species and a second mammalian species, optionally a third mammalian species, and further optionally a fourth mammalian species. As a chimeric embryo develops, the one or more cell of a second mammalian species may fill the vacated developmental organ niche, or may enrich in a target organ.

[0063] A cell of a first or second mammalian species as described herein may be selected from a human cell or non-human mammalian cell. The non-human mammalian cell may be a rodent cell, optionally selected from a mouse cell or rat cell; a non-human primate cell, optionally selected from a monkey cell, chimpanzee cell, gorilla cell, orangutan cell, rhesus macaque cell, marmoset cell or bonobo cell); an ungulate cell, optionally selected from a pig cell, horse cell, cattle cell, sheep cell, goat cell, or donkey cell; or another mammal. In some embodiments, a cell of the first species is a human cell and the cell of the second species is a non-human mammalian cell. In some embodiments, a cell the second species is a human cell and the cell of the first species is a non-human mammalian cell.

[0064] In an aspect, the chimeric embryo may comprise at least 2-cells, at least 4-cells, at least 8-cells, at least 16-cells, at least 32-cells, at least 64-cells, at least 128 cells, or more. The respective percentage of cells of the first and second mammalian species in the population of cells may vary depending on, for example, the developmental stage of the embryo, the duration of chimerism, and the cellular growth rate of the cells of the first and second mammalian species in the embryo.

[0065] The population of cells may comprise one or more cell of a first mammalian species comprising about 1% to about 5%, about 5% to about 10%, about 10% to about 15%, about 15% to about 20%, about 20% to about 30%, about 30% to about 40%, about 40% to about 50%, about 50% to about 60%, about 60% to about 70%, about 70% to about 80%, about 80% to about 85%, about 90% to about 95%, or greater than 95% of the cells of the chimeric embryo. In some embodiments, the population of cells may comprise one or more cell of a first mammalian species comprising about 1% or more, about 5% or more, about 10% or more, about 15% or more, about 15% or more, about 20% or more, about 30% or more, about 40% or more, about 50% or more, about 60% or more, about 70% or more, about 80% or more, about 85% or more, about 90% or more, about 91% or more, about 92% or more, about 93% or more, about 94% or more, about 95% or more, about 96% or more, about 97% or more, about 98% or more, or about 99% or more of the cells of the chimeric embryo.

[0066] The population of cells may comprise one or more cell of a second mammalian species comprising about 1% to about 5%, about 5% to about 10%, about 10% to about 15%, about 15% to about 20%, about 20% to about 30%, about 30% to about 40%, about 40% to about 50%, about 50% to about 60%, about 60% to about 70%, about 70% to about 80%, about 80% to about 85%, about 90% to about 95%, or greater than 95% of the cells of the chimeric embryo. In some embodiments, the population of cells may comprise one or more cell of a second mammalian species comprising about 1% or more, about 5% or more, about 10% or more, about 15% or more, about 15% or more, about 20% or more, about 30% or more, about 40% or more, about 50% or more, about 60% or more, about 70% or more, about 80% or more, about 85% or more, about 90% or more, about 91% or more, about 92% or more, about 93% or more, about 94% or more, about 95% or more, about 96% or more, about 97% or more, about 98% or more, or about 99% or more of the cells of the chimeric embryo.

### (b) Nucleic Acids

[0067] In an aspect, a cell of a first mammalian species or a cell of a second mammalian species, as described herein (e.g., as in a population of cells, or a method comprising a cell or population of cells), comprises a nucleic acid encoding one or more protein selected from an antigen-binding protein, antigen, cell membrane signal peptide, or cell membrane anchor protein. The nucleic acid encoding the protein may be an exogenous nucleic acid or recombinant nucleic acid.

[0068] The nucleic acid encoding the protein may comprise a nucleic acid sequence encoding an antigen-binding protein and one or more cell membrane signal peptide and/or one or more cell membrane anchor protein. The nucleic acid encoding the protein may comprise a nucleic acid sequence encoding an antigen and one or more cell membrane signal peptide and/or one or more cell membrane anchor protein. Multiple cell membrane anchor proteins, such as a two, three, or four, may be encoded along with an antigen or antigen-binding protein. The antigen-binding protein may be on the cell of a first mammalian species and the antigen on the cell of a second mammalian species, or the antigen-binding protein may be on the cell of a second mammalian species and the antigen on the cell of a first mammalian species.

[0069] In a further aspect, the nucleic acid sequence encoding the protein comprises a nucleic acid sequence encoding a linker. A linker may attach the expressed protein (e.g., an antigen-binding protein or antigen) to the cell membrane signal peptide, or to the cell membrane anchor protein, or both. Multiple linkers can be used, which can be the same or the linkers may be different from each other. A linker may also attach the cell membrane signal peptide to the cell membrane anchor protein. In some embodiments, the linker comprises an amino acid sequence that is rich in glycine, serine, alanine, or a combination thereof. In some embodiments, the peptide linker may be of from 1 to about 30 amino acid residues in length, inclusive. In some embodiments, the peptide linker may be 2-3 amino acid residues in length, 4-5 amino acid residues in length, 6-7 amino acid residues in length, 8-9 amino acid residues in length, 10-11 amino acid residues in length, 12-13 amino acid residues in length, 14-15 amino acid residues in length, 16-17 amino acid residues in length, 18-19 amino acid residues in length, or greater than 20 amino acid residues in length. In some embodiments, the linker comprises the amino acid sequence of GGGG/S. In some embodiments, the linker comprises an amino acid selected from any one of SEQ ID NOS: 5-7, or an amino acid sequence having at least 80%, at least 81%, at least 82%, at least 83%, at least 84%, at least 85%, at least 86%, at least 87%, at least 88%, at least 89%, at least 90%, at least 91%, at least 92%, at least 93%, at least 94%, at least 95%, at least 96%, at least 97%, at least 98%, at least 99% or 100% identity with the sequence set forth in any one of SEQ ID NOS: 5-7.

[0070] In an aspect, the nucleic acid sequence encoding the protein may further comprise one or more regulatory sequences. The nucleic acid encoding the protein may be operably linked to one or more transcription regulatory sequences. “Transcriptional regulatory elements” refer to any nucleotide sequence that influences transcription initiation and rate, or stability and/or mobility of a transcript product. Regulatory sequences include, but are not limited to, promoters, promoter control elements, enhancers, protein binding sequences, 5′ and 3′ UTRs, transcriptional start sites, termination sequences, polyadenylation sequences, introns, etc. Such transcriptional regulatory sequences can be located either 5′-, 3′-, or within the coding region of the nucleic acid encoding the protein and can be either promote (positive regulatory element) or repress (negative regulatory element) transcription. The nucleic acid may comprise one or more transposase ITR. The one or more transoposase ITR may be a piggybac transposase ITR. A transposase system may be used to enhance genetic modification or integration.

[0071] The nucleic acid as described herein may comprise one or more regulatory sequence, transcription regulatory sequence, or other nucleic acid component of a vector as described herein, such as disclosed in any one of SEQ ID NOS: 46-113. The nucleic acid sequence may comprise a regulatory sequence having the nucleic acid sequence of a regulatory sequence within any one of SEQ ID NOS: 46-113, or a variant thereof having a percent identity to any one of SEQ ID NOS: 46-113 that conserves function of the regulatory sequence.

[0072] In an aspect, the transcription regulatory sequence is a promoter, an enhancer, or both. A regulatory sequence can be a promoter. A disclosed promoter can comprise a ubiquitous promoter, a constitutive promoter, or a tissue specific promoter. In an aspect, a disclosed promoter can be operably linked to a nucleic acid sequence encoding a protein as described herein. In an aspect, a disclosed promoter can be a promoter/enhancer. An enhancer element is a nucleic acid sequence that functions to enhance transcription. In an aspect, a disclosed promoter can be an endogenous promoter. In an aspect, a disclosed endogenous promoter can be an endogenous promoter/enhancer. In an aspect, a disclosed promoter or a disclosed promoter/enhancer can be used for constitutive and efficient expression of the disclosed nucleic acid. In an aspect, a disclosed promoter or a disclosed promoter/enhancer can be used for inducible and efficient expression of a disclosed antigen or antigen-binding protein. A promoter can be an inducible promoter (e.g., a heat shock promoter, tetracycline-regulated promoter, steroid-regulated promoter, metal-regulated promoter, estrogen receptor-regulated promoter, etc.). The promoter can be a constitutive promoter (e.g., CMV promoter, UBC promoter, CAG promoter). In some cases, the promoter can be a spatially restricted and/or temporally restricted promoter (e.g., a tissue specific promoter, a cell type specific promoter, etc.). Promoters and enhancer sequences are known to the art.

[0073] The promoter can be chosen so that it will function in the target cell(s) of interest. Cell- or tissue-specific promoters refer to promoters that have activity in only certain cell types. The use of a cell- or tissue-specific promoter in a nucleic acid expression cassette can restrict unwanted transgene expression in the unaffected tissues or cells as well as facilitate persistent transgene expression by escaping from transgene induced host immune responses. Tissue specific promoters include, but are not limited to, kidney-specific promoters, liver-specific promoters, heart-specific promoters, lung-specific promoters, pancreas-specific promoters, muscle-specific promoters (e.g., skeletal muscle-specific promoters), or specific to a cell, organ, organoid, or type type described herein.

[0074] In other aspects, the promoter can be a constitutive promoter. Constitutive promoters refer to promoters that allow for continual transcription of its associated gene. Constitutive promoters are always active and can be used to express genes in a wide range of cells and tissues. Examples of constitutive promoters include, but are not limited to, U6 promoter, a CMV major immediate-early enhancer/chicken beta-actin promoter, a cytomegalovirus (CMV) major immediate-early promoter, an Elongation Factor 1-a (EF1-a) promoter, a simian vacuolating virus 40 (SV40) promoter, an AmpR promoter, a PgK promoter, a human ubiquitin C gene (Ubc) promoter, a MFG promoter, a human beta actin promoter, a CAG promoter, a EGRI promoter, a FerH promoter, a FerL promoter, a GRP78 promoter, a GRP94 promoter, a HSP70 promoter, a b-kin promoter, a murine phosphoglycerate kinase (mPGK) or human PGK (hPGK) promoter, a ROSA promoter, human Ubiquitin B promoter, a Rous sarcoma virus promoter, or any other natural or synthetic ubiquitous promoters. In an aspect, the constitutively active promoter can comprise human b-actin, human elongation factor-la, chicken b-actin combined with cytomegalovirus early enhancer, cytomegalovirus (CMV), simian virus 40, or herpes simplex virus thymidine kinase.

[0075] Inducible promoters refer to promoters that can be regulated by positive or negative control. Factors that can regulate an inducible promoter include, but are not limited to, chemical agents (e.g., the metallothionein promoter or a hormone inducible promoter), temperature, and light. As discussed above, a disclosed promoter can be an endogenous promoter. Endogenous refers to a disclosed promoter or disclosed promoter/enhancer that is naturally linked with its gene. In an aspect, a disclosed endogenous promoter can generally be obtained from a non-coding region upstream of a transcription initiation site of a gene.

[0076] Methods of introducing the disclosed nucleic acids into the cell of the first or second species are well known in the art, and may include viral transfection, plasmid transduction, CRISPR related technologies etc. In an aspect, the cell of the first or second species or both may further comprise one or more additional genetic modifications. In an aspect, the one or more genetic modification may promote the growth of cell and cell division of the cells of one species, over the growth and cell division of cells of the other species. In an aspect, the one of more genetic modification may comprise a deletion in a developmental gene. In an aspect, the one of more genetic modification may comprise induction of organo-genesis deficiency.

[0077] The nucleic acid as described here may be a vector as described herein, either fully or partially. The nucleic acid may comprise the nucleotide sequence set forth in any one of SEQ ID NOS: 46-113, a fragment thereof, or a functionally equivalent variant sequence thereof.

(c) Antigen-binding protein

[0078] The antigen present at the surface of the cell to be adhered to specifically binds to the antigen-binding protein of the other species. Cells engineered to express antigens in the outer plasma membrane can significantly improve the adhesion between cells of different species, when the cell from the other species expresses an antigen-binding protein at its surface to mediate the interaction. The antigen-binding domain may bind to an endogenous antigen on the cell of the other mammalian species, or an exogenous antigen on the cell of the other mammalian species.

[0079] An antigen-binding protein may be selected from an antibody or antigen-binding fragment thereof. The antibody may be a conventional antibody (e.g., an IgG antibody comprising a Fab and Fc) derived from a rodent (e.g., mouse or rodent), human, non-human primate, or ungulate. The may be a camelid-derived antibody or a shark-derived antibody. The antibody may polyclonal or monoclonal. The antibody may be humanized or not humanized. The antibody may be from the first mammalian species, or second mammalian species. The antigen-binding protein may be a fragment of antibody comprising the antigen-binding domain.

[0080] The antigen-binding protein may be a single domain antibody. The antigen-binding protein may comprise the VHH domains or VLL domains of an antibody. The antigen-binding protein may be a nanobody. Exemplary nanobodies are provided herein, including the anti-GFP nanobodies of the Examples.

[0081] An antigen-binding protein may be selected from a fragment variable domain (FV) (e.g., comprising a VH and VL); a fragment antigen binding (Fab) domain (e.g., comprising a VH-CHI and VL-CL1); a Fab′ (e.g., a Fab with part of the hinge), a (Fab′) 2 (e.g., two Fab regions with a hinge), or a half-IgG (e.g., an rIgG, or having only the left or right half of an antibody such as VH-CH1-CH2-CH3 and VL-CL). The antigen-binding protein may comprise antibody fragments linked together with linkers. The antigen-binding protein may be selected from: a single-chain fragment variable domain (scFv) (e.g., VH and VL connected with a linker); a diabody or dscFv (e.g., a divalent scFV comprising two scFv fragments connected with a linker); a triabody or tri-scFv (e.g., three scFv fragments connected with a linker); an single chain Fab (scFab) (e.g., a Fab element connected by a linker instead of hinge); a minibody (e.g., two scFv fragments connected with with CH3 regions, optionally with a hinge or linker); or an scFv-Fc (e.g., two scFv fragments linked to partial Fc region).

[0082] In some embodiments, the antigen-binding protein binds to an endogenous antigen of the cell type of the first mammalian species or second mammalian species (e.g., human or non-human cell type). In some embodiments, the antigen-binding protein binds to an exogenous antigen of the cell type of the first mammalian species or second mammalian species (e.g., human or non-human cell type). In some embodiments, the antigen-binding protein binds to green fluorescent protein, or an isoform thereof.

[0083] In some embodiments, an antigen-binding protein comprises the amino acid sequence set forth in any one of SEQ ID NOS: 17-45, or an amino acid sequence having at least 80%, at least 81%, at least 82%, at least 83%, at least 84%, at least 85%, at least 86%, at least 87%, at least 88%, at least 89%, at least 90%, at least 91%, at least 92%, at least 93%, at least 94%, at least 95%, at least 96%, at least 97%, at least 98%, at least 99% or 100% identity with the sequence set forth in any one of SEQ ID NOS: 17-45.

[0084] In some embodiments, an antigen-binding protein may have the amino acid sequence of a component of a vector that binds to the antigen as described herein, such as disclosed in any one of SEQ ID NOS: 46-113, or a variant thereof having a percent identity to any one of SEQ ID NOS: 46-113 that conserves function of the antigen-binding protein.

### (d) Antigens

[0085] The antigen specifically bound to by the antigen-binding protein may be a protein or a fragment thereof, which is present at the surface of the cell to be adhered to. Cells engineered to express antigens in the outer plasma membrane can significantly improve the adhesion between cells of different species, when the cell from the other species expresses an antigen-binding protein at its surface to mediate the interaction. The antigen be an outer plasma membrane antigen, or surface antigen. In some embodiments, the antigen is present on the cell of a first mammalian species and the antigen-binding protein is present on the cell of a second mammalian species. In some embodiments, the antigen is present on the cell of a second mammalian species, and the antigen-binding protein is present on the cell of a first mammalian species. The cell of the first species may be a human cell, and the cell of the second species may be a non-human mammalian cell.

[0086] In an aspect, the antigen may be endogenous to the cell type selected for the first or second mammalian species (e.g., human or non-human cell). For example, an antigen-binding protein may be engineered into a cell of a first mammalian species, wherein the antigen-binding protein specifically binds to an antigen endogenously expressed by a certain cell type of the second mammalian species. The antigen-binding protein may be engineered into a cell of a second mammalian species, wherein the antigen-binding protein specifically binds to an antigen endogenously expressed by a certain cell type of a first mammalian species. The antigen may be endogenously expressed by the first or second mammalian species (e.g., human or non-human mammalian species) totipotent stem cell, pluripotent stem cell, multipotent stem cell, oligopotent stem cell, or unipotent stem cell, as described herein. The antigen may be endogenously expressed by a blastomere, 4-cell embryo, embryonic stem cell, epiblast-derived stem cell, induced pluripotent stem cell, naïve pluripotent stem cell, endothelial stem cell, or progenitor cell of the first or second mammalian species, as described herein. The antigen may be from an embryonic or induced cellular state, and/or a primed or naive cellular state.

[0087] The endogenous antigen may be an antigen specific for an embryonic stem cell, optionally wherein the antigen is selected from CD9, CD15/SSEA-1, CD24, CD29 (B1 integrin), CD31 (PECAM-1), CD49b/ITGA2, CD49c/ITGA3, CD49e/ITGA5, CD49f/ITGA6 (integrin A6), CD59, CD90 (Thy-1), CD117 (c-Kit), CD133, CD324 (E-Cadherin), CD326/EpCAM, CD338/ABCG2, Cripto, or Frizzled5. The endogenous antigen may be an antigen specific for a pluripotent stem cell, optionally wherein the antigen is selected from cSSEA1, SSEA3, SSEA4, SSEA5, TRA-1-60, TRA-1-81, or TRA-2-54. Amino acid sequences for endogenous antigens may be found for a specific species or cell type from publicly available databases, e.g., NCBI or UniProt, which provides sequence annotation of domains that are targetable for antigen-binding proteins.

[0088] The antigen may be exogenous to the cell type selected for the first or second mammalian species. When the first or second mammalian species is a human, the exogenous antigen may not be an endogenous antigen of that particular human cell type. When the first or second mammalian species is a non-human mammal, the exogenous antigen may not be an endogenous antigen of that particular non-human mammalian cell type. the antigen may be engineered into a cell of a first mammalian species, when the antigen-binding protein is engineered into the cell of a second mammalian species. Or, the antigen may be engineered into a cell of a second mammalian species, when the antigen-binding protein is engineered into the cell of a first mammalian species. In some embodiments, the antigen is exogenous to both the first and second mammalian species, or is exogenous to the specific cell type of each of the first and second mammalian species.

[0089] Any protein or polypeptide that can be recognized by an antigen-binding protein, as described herein, can be an antigen engineered into the cell membrane. In some embodiments, the antigen is fluorophore or an isoform thereof. The antigen may be selected from mCherry, or an isoform thereof; or green-fluorescent protein, or isoform thereof. Exemplary antigens are provided herein, including the GFP constructs of the Examples.

[0090] The antigen may be an exogenous peptide or polypeptide, which can be natural or synthetic. For example, an antigen-binding protein may be generated against an antigen using techniques known in the art (e.g., immunization of an animal, and recombinant production of the antigen-binding fragment of the antibodies from the immunized animal).

[0091] In some embodiments, an antigen comprises the amino acid sequence set forth in any one of SEQ ID NOS: 14-16, or an amino acid sequence having at least 80%, at least 81%, at least 82%, at least 83%, at least 84%, at least 85%, at least 86%, at least 87%, at least 88%, at least 89%, at least 90%, at least 91%, at least 92%, at least 93%, at least 94%, at least 95%, at least 96%, at least 97%, at least 98%, at least 99% or 100% identity with the sequence set forth in any one of SEQ ID NOS: 14-16.

[0092] In some embodiments, an antigen may have the amino acid sequence of a component of a vector that binds to the antigen-binding protein as described herein, such as disclosed in any one of SEQ ID NOS: 46-113, or a thereof having a percent identity to any one of SEQ ID NOS: 46-113 that conserves function of the antigen.

### (e) Cell Membrane Signaling Peptides

[0093] A cell of a first or second mammalian species (e.g., a human cell or non-human cell, as described herein), may comprise a nucleic acid encoding a cell membrane signaling peptide. The cell membrane signaling peptide directs the encoded protein to which it is attached to the cell membrane. The cell membrane signaling protein may bind to a signal recognition protein for directing to the cell membrane. The cell membrane signaling peptide may direct the encoded protein to the membrane of the endoplasmic reticulum (ER). The cell membrane signaling peptide may translocate the encoded protein to the ER. After incorporation into the ER, the encoded protein may be directed to the cell membrane. The cell membrane signaling protein may comprise at least one transmembrane domain. The cell membrane signaling peptide may be an amino acid sequence that directs the expressed protein (e.g., an antigen-binding protein or an antigen) to the cell surface (e.g., the outer cell surface) of the cell of the first or second mammalian species (e.g., human cell or non-human cell). Cell membrane signaling peptides are well known in the art. For example, they are immediately derivable from proteins that are transported to the cell membrane after translation, as can be identified using publicly available databases such as NCBI or UniProt.

[0094] When a particular cell membrane anchor protein is utilized, the canonical cell membrane signaling protein for that anchor protein may be used. Alternatively, the canonical cell membrane signaling protein for that anchor protein may not be used. In some embodiments, a cell membrane signaling peptide is selected from an acrosin membrane signaling peptide, a CD8 membrane signaling peptide, an integrin membrane signaling peptide, or a Cldn6 membrane signaling peptide. In some embodiments, the cell membrane signaling peptide is encoded by a component of a vector as described herein, such as disclosed in any one of SEQ ID NOS: 46-113, or a thereof having a percent identity to any one of SEQ ID NOS: 46-113 that conserves function of the cell membrane signaling peptide.

[0095] In some embodiments, the cell membrane signaling protein comprises the amino acid sequence set forth in any one of SEQ ID NOS: 1-4, or an amino acid sequence having at least 80%, at least 81%, at least 82%, at least 83%, at least 84%, at least 85%, at least 86%, at least 87%, at least 88%, at least 89%, at least 90%, at least 91%, at least 92%, at least 93%, at least 94%, at least 95%, at least 96%, at least 97%, at least 98%, at least 99% or 100% identity with the sequence set forth in any one of SEQ ID NOS: 1-4.

[0096] The cell membrane signaling peptide may introduce a lipid anchor into the encoded protein. The lipid anchor may be introduced into the encoded protein as a post-translation modification. The lipid anchor may be a molecule that inserts into the cell membrane, whereby the encoded protein is anchored to the cell membrane. The lipid anchor may comprise one or more glycerol moiety, phosphate moiety, fatty acid moiety, or carbohydrate moiety. The lipid anchor may comprise one or more acyl chains (e.g., sn-1 acyl chain, or sn-2 acyl chain). The lipid anchor may comprise one or more hydrophobic moieties (e.g., a hydrophobic phosphatidyl-inositol). The lipid anchor may comprise one, two, three, or more fatty acid chains. Some or all of the fatty acid chains may be inserted into the cell membrane. The lipid anchor may be a phospholipid. The lipid anchor may be attached to encoded protein at the C-terminus, N-terminus, or to an amino acid or modified amino acid within the encoded protein. The attachment of the lipid anchor to the encoded protein may comprise a linker (e.g., a carbohydrate-containing linker, such as comprising glucosamine or mannose). The attachment may comprise an ethanolamine phosphate bridge.

[0097] In some embodiments, the cell membrane signaling peptide introduces a glycosylphosphatidylinositol (GPI) into the encoded protein (e.g., an antigen-binding protein or an antigen). In some embodiments, the cell membrane signaling peptide marks protein for post-translational GPI addition. In some embodiments, the cell membrane signaling peptide is a Thy-1 signaling peptide. In some embodiments, the cell membrane signaling protein comprises the amino acid sequence set forth in SEQ ID NO:8, or an amino acid sequence having at least 80%, at least 81%, at least 82%, at least 83%, at least 84%, at least 85%, at least 86%, at least 87%, at least 88%, at least 89%, at least 90%, at least 91%, at least 92%, at least 93%, at least 94%, at least 95%, at least 96%, at least 97%, at least 98%, at least 99% or 100% identity with the sequence set forth in any one of SEQ ID NO:8.

### (f) Cell Membrane Anchor Proteins

[0098] A cell membrane anchor protein as described herein may be present on a cell of a first mammalian species or cell of a second mammalian species, as described herein. Such cell membrane anchor proteins localize the antigen-binding protein to cell surface. The cell membrane anchor protein may comprise at least one transmembrane domain (e.g., one, two, three, or more transmembrane domains). The transmembrane domain may comprise a transmembrane a-helix, or transmembrane β-sheet. The cell membrane anchor protein may be biotopic (e.g., single pass) or polytopic (e.g., multipass). The cell membrane anchor protein may be glycosylated, or may be not glycosylated.

[0099] Certain cell membrane anchor proteins may be only peripherally, rather than integrally, embedded into the membrane. In a further aspect, the membrane anchor protein associates with or attaches to the cytoskeleton. In some embodiments, the cell membrane anchor protein integrates into the membrane by connecting with the cytoskeleton.

[0100] The cell anchor protein may be selected from cluster of differentiation 8 (CD8), intercellular adhesion molecule 1 (ICAM1), cadherin-1 or epithelial cadherin (E-Cad), claudin (CLDN6), or integrin subunit beta 1 (ITGB1). The cell anchor protein may comprise one or more transmembrane domains selected from the transmembrane domains of CD8, ICAM1, E-Cad, CLDN6, or ITGB1.

[0101] The anchor protein may be selected from integrin subunit beta 2 (ITGB2), junctional adhesion molecule B (JAM-B), neural cell adhesion molecule 1 (NCAM-1), mucin 4 (MUC-4), or platelet derived growth factor receptor alpha (PDGFRA). The cell anchor protein may comprise one or more transmembrane domains selected from the transmembrane domains of ITGB2, JAM-B, NCAM-1, MUC-4, or PDGFRA.

[0102] A CD8 cell anchor protein as described herein (e.g., as encoded by a nucleic acid or as present on a cell of a first mammalian species or cell of a second mammalian species), may be a complete CD8 protein or a fragment thereof comprising an amino acid sequence that is a cell membrane anchor. In some embodiments, the CD8 protein comprises a transmembrane domain from a human CD8 protein. In some embodiments, the CD8 protein comprises a transmembrane domain from a rodent CD8 protein, optionally selected from a mouse CD8 protein or rat CD8 protein. In some embodiments, the CD8 protein comprises a transmembrane domain from a non-human primate CD8 protein, optionally selected from a monkey CD8 protein, chimpanzee CD8 protein, gorilla CD8 protein, orangutan CD8 protein, rhesus macaque CD8 protein, marmoset CD8 protein, or bonobo CD8 protein. In some embodiments, the CD8 protein comprises a transmembrane domain from an ungulate CD8 protein, optionally selected from a pig CD8 protein, horse CD8 protein, cattle CD8 protein, sheep CD8 protein, goat CD8 protein, or donkey CD8 protein.

[0103] A ICAM1 cell anchor protein as described herein (e.g., as encoded by a nucleic acid or as present on a cell of a first mammalian species or cell of a second mammalian species), may be a complete ICAM1 protein or a fragment thereof comprising an amino acid sequence that is a cell membrane anchor. In some embodiments, the ICAM1 protein comprises a transmembrane domain from a human ICAM1 protein. In some embodiments, the ICAM1 protein comprises a transmembrane domain from a rodent ICAM1 protein, optionally selected from a mouse ICAM1 protein or rat ICAM1 protein. In some embodiments, the ICAM1 protein comprises a transmembrane domain from a non-human primate ICAM1 protein, optionally selected from a monkey ICAM1 protein, chimpanzee ICAM1 protein, gorilla ICAM1 protein, orangutan ICAM1 protein, rhesus macaque ICAM1 protein, marmoset ICAM1 protein, or bonobo ICAM1 protein. In some embodiments, the ICAM1 protein comprises a transmembrane domain from an ungulate ICAM1 protein, optionally selected from a pig ICAM1 protein, horse ICAM1 protein, cattle ICAM1 protein, sheep ICAM1 protein, goat ICAM1 protein, or donkey ICAM1 protein.

[0104] A E-CAD cell anchor protein as described herein (e.g., as encoded by a nucleic acid or as present on a cell of a first mammalian species or cell of a second mammalian species), may be a complete E-CAD protein or a fragment thereof comprising an amino acid sequence that is a cell membrane anchor. In some embodiments, the E-CAD protein comprises a transmembrane domain from a human E-CAD protein. In some embodiments, the E-CAD protein comprises a transmembrane domain from a rodent E-CAD protein, optionally selected from a mouse E-CAD protein or rat E-CAD protein. In some embodiments, the CD protein comprises a transmembrane domain from a non-human primate E-CAD protein, optionally selected from a monkey E-CAD protein, chimpanzee E-CAD protein, gorilla E-CAD protein, orangutan E-CAD protein, rhesus macaque E-CAD protein, marmoset E-CAD protein, or bonobo E-CAD protein. In some embodiments, the E-CAD protein comprises a transmembrane domain from an ungulate E-CAD protein, optionally selected from a pig E-CAD protein, horse E-CAD protein, cattle E-CAD protein, sheep E-CAD protein, goat E-CAD protein, or donkey E-CAD protein.

[0105] A CLDN6 cell anchor protein as described herein (e.g., as encoded by a nucleic acid or as present on a cell of a first mammalian species or cell of a second mammalian species), may be a complete CLDN6 protein or a fragment thereof comprising an amino acid sequence that is a cell membrane anchor. In some embodiments, the CLDN6 protein comprises a transmembrane domain from a human CLDN6 protein. In some embodiments, the CLDN6 protein comprises a transmembrane domain from a rodent CLDN6 protein, optionally selected from a mouse CLDN6 protein or rat CLDN6 protein. In some embodiments, the CLDN6 protein comprises a transmembrane domain from a non-human primate CLDN6 protein, optionally selected from a monkey CLDN6 protein, chimpanzee CLDN6 protein, gorilla CLDN6 protein, orangutan CLDN6 protein, rhesus macaque CLDN6 protein, marmoset CLDN6 protein, or bonobo CLDN6 protein. In some embodiments, the CLDN6 protein comprises a transmembrane domain from an ungulate CLDN6 protein, optionally selected from a pig CLDN6 protein, horse CLDN6 protein, cattle CLDN6 protein, sheep CLDN6 protein, goat CLDN6 protein, or donkey CLDN6 protein.

[0106] A ITGB1 cell anchor protein as described herein (e.g., as encoded by a nucleic acid or as present on a cell of a first mammalian species or cell of a second mammalian species), may be a complete ITGB 1 protein or a fragment thereof comprising an amino acid sequence that is a cell membrane anchor. In some embodiments, the ITGB1 protein comprises a transmembrane domain from a human ITGB1 protein. In some embodiments, the ITGB1 protein comprises a transmembrane domain from a rodent ITGB1 protein, optionally selected from a mouse ITGB1 protein or rat ITGB1 protein. In some embodiments, the ITGB1 protein comprises a transmembrane domain from a non-human primate ITGB1 protein, optionally selected from a monkey ITGB1 protein, chimpanzee ITGB1 protein, gorilla ITGB1 protein, orangutan ITGB1 protein, rhesus macaque ITGB1 protein, marmoset ITGB 1 protein, or bonobo ITGB1 protein. In some embodiments, the ITGB1 protein comprises a transmembrane domain from an ungulate ITGB1 protein, optionally selected from a pig ITGB1 protein, horse ITGB1 protein, cattle ITGB1 protein, sheep ITGB1 protein, goat ITGB 1 protein, or donkey ITGB1 protein.

[0107] A ITGB2 cell anchor protein as described herein (e.g., as encoded by a nucleic acid or as present on a cell of a first mammalian species or cell of a second mammalian species), may be a complete ITGB2 protein or a fragment thereof comprising an amino acid sequence that is a cell membrane anchor. In some embodiments, the ITGB2 protein comprises a transmembrane domain from a human ITGB2 protein. In some embodiments, the ITGB2 protein comprises a transmembrane domain from a rodent ITGB2 protein, optionally selected from a mouse ITGB2 protein or rat ITGB2 protein. In some embodiments, the ITGB2 protein comprises a transmembrane domain from a non-human primate ITGB2 protein, optionally selected from a monkey ITGB2 protein, chimpanzee ITGB2 protein, gorilla ITGB2 protein, orangutan ITGB2 protein, rhesus macaque ITGB2 protein, marmoset ITGB2 protein, or bonobo ITGB2 protein. In some embodiments, the ITGB2 protein comprises a transmembrane domain from an ungulate ITGB2 protein, optionally selected from a pig ITGB2 protein, horse ITGB2 protein, cattle ITGB2 protein, sheep ITGB2 protein, goat ITGB2 protein, or donkey ITGB2 protein.

[0108] A JAM-B cell anchor protein as described herein (e.g., as encoded by a nucleic acid or as present on a cell of a first mammalian species or cell of a second mammalian species), may be a complete JAM-B protein or a fragment thereof comprising an amino acid sequence that is a cell membrane anchor. In some embodiments, the JAM-B protein comprises a transmembrane domain from a human JAM-B protein. In some embodiments, the JAM-B protein comprises a transmembrane domain from a rodent JAM-B protein, optionally selected from a mouse JAM-B protein or rat JAM-B protein. In some embodiments, the JAM-B protein comprises a transmembrane domain from a non-human primate JAM-B protein, optionally selected from a monkey JAM-B protein, chimpanzee JAM-B protein, gorilla JAM-B protein, orangutan JAM-B protein, rhesus macaque JAM-B protein, marmoset JAM-B protein, or bonobo JAM-B protein. In some embodiments, the JAM-B protein comprises a transmembrane domain from an ungulate JAM-B protein, optionally selected from a pig JAM-B protein, horse JAM-B protein, cattle JAM-B protein, sheep JAM-B protein, goat JAM-B protein, or donkey JAM-B protein.

[0109] A NCAM-1 cell anchor protein as described herein (e.g., as encoded by a nucleic acid or as present on a cell of a first mammalian species or cell of a second mammalian species), may be a complete NCAM-1 protein or a fragment thereof comprising an amino acid sequence that is a cell membrane anchor. In some embodiments, the NCAM-1 protein comprises a transmembrane domain from a human NCAM-1 protein. In some embodiments, the NCAM-1 protein comprises a transmembrane domain from a rodent NCAM-1 protein, optionally selected from a mouse NCAM-1 protein or rat NCAM-1 protein. In some embodiments, the NCAM-1 protein comprises a transmembrane domain from a non-human primate NCAM-1 protein, optionally selected from a monkey NCAM-1 protein, chimpanzee NCAM-1 protein, gorilla NCAM-1 protein, orangutan NCAM-1 protein, rhesus macaque NCAM-1 protein, marmoset NCAM-1 protein, or bonobo NCAM-1 protein. In some embodiments, the NCAM-1 protein comprises a transmembrane domain from an ungulate NCAM-1 protein, optionally selected from a pig NCAM-1 protein, horse NCAM-1 protein, cattle NCAM-1 protein, sheep NCAM-1 protein, goal NCAM-1 protein, or donkey NCAM-1 protein.

[0110] A MUC-4 cell anchor protein as described herein (e.g., as encoded by a nucleic acid or as present on a cell of a first mammalian species or cell of a second mammalian species), may be a complete MUC-4 protein or a fragment thereof comprising an amino acid sequence that is a cell membrane anchor. In some embodiments, the MUC-4 protein comprises a transmembrane domain from a human MUC-4 protein. In some embodiments, the MUC-4 protein comprises a transmembrane domain from a rodent MUC-4 protein, optionally selected from a mouse MUC-4 protein or rat MUC-4 protein. In some embodiments, the MUC-4 protein comprises a transmembrane domain from a non-human primate MUC-4 protein, optionally selected from a monkey MUC-4 protein, chimpanzee MUC-4 protein, gorilla MUC-4 protein, orangutan MUC-4 protein, rhesus macaque MUC-4 protein, marmoset MUC-4 protein, or bonobo MUC-4 protein. In some embodiments, the MUC-4 protein comprises a transmembrane domain from an ungulate MUC-4 protein, optionally selected from a pig MUC-4 protein, horse MUC-4 protein, cattle MUC-4 protein, sheep MUC-4 protein, goal MUC-4 protein, or donkey MUC-4 protein.

[0111] A PDGFRA cell anchor protein as described herein (e.g., as encoded by a nucleic acid or as present on a cell of a first mammalian species or cell of a second mammalian species), may be a complete PDGFRA protein or a fragment thereof comprising an amino acid sequence that is a cell membrane anchor. In some embodiments, the PDGFRA protein comprises a transmembrane domain from a human PDGFRA protein. In some embodiments, the PDGFRA protein comprises a transmembrane domain from a rodent PDGFRA protein, optionally selected from a mouse PDGFRA protein or rat PDGFRA protein. In some embodiments, the PDGFRA protein comprises a transmembrane domain from a non-human primate PDGFRA protein, optionally selected from a monkey PDGFRA protein, chimpanzee PDGFRA protein, gorilla PDGFRA protein, orangutan PDGFRA protein, rhesus macaque PDGFRA protein, marmoset PDGFRA protein, or bonobo PDGFRA protein. In some embodiments, the PDGFRA protein comprises a transmembrane domain from an ungulate PDGFRA protein, optionally selected from a pig PDGFRA protein, horse PDGFRA protein, cattle PDGFRA protein, sheep PDGFRA protein, goal PDGFRA protein, or donkey PDGFRA protein.

[0112] Amino acid sequences for CD8, ICAM1, E-Cad, CLDN6, ITGB1, ITGB2, JAM-B, NCAM-1, MUC-4, or PDGFRA of different species are available in public sequence databases, such as UniProt or NCBI, including annotation for transmembrane domains.

[0113] In some embodiments, the cell anchor protein is encoded by a component of a vector as described herein, such as disclosed in any one of SEQ ID NOS: 46-113, or a thereof having a percent identity to any one of SEQ ID NOS: 46-113 that conserves function of the cell anchor protein.

[0114] In some embodiments, the cell anchor protein comprises the amino acid sequence set forth in any one of SEQ ID NOS: 9-13, or an amino acid sequence having at least 80%, at least 81%, at least 82%, at least 83%, at least 84%, at least 85%, at least 86%, at least 87%, at least 88%, at least 89%, at least 90%, at least 91%, at least 92%, at least 93%, at least 94%, at least 95%, at least 96%, at least 97%, at least 98%, at least 99% or 100% identity with the sequence set forth in any one of SEQ ID NOS: 9-13.

### III. Organ, Organoid or Tissues

[0115] In an aspect, the current disclosure also encompasses an organ, an organoid, or a tissue, comprising a population of cells as described herein. The organ, organoid, or tissue develops from a population as described herein.

[0116] In an aspect, the organ, organoid or tissue comprises cells from a first mammalian species and a second mammalian species (e.g., a human and non-human species). In an aspect, the first or second mammalian may comprise less than 1% to less than 5%, or less than 5% to less than 10%, or less than 10% to less than 15%, or less than 15% to less than 20%, or less than 20% to less than 30%, or less than 30% to less than 40%, or less than 40% to less than 50%, or less than 50% to less than 60%, or less than 60% to less than 70%, or less than 70% to less than 80%, or less than 80% to less than 90%, or less that 90% to less than 91%, or less that 91% to less than 92%, or less that 92% to less than 93%, or less that 93% to less than 94%, or less that 94% to less than 95%, or less that 95% to less than 96%, or less that 96% to less than 97%, or less that 97% to less than 98%, or less that 98% to less than 99%, or less than 99% to less than 100%, of the cells of the organ, organoid or tissue, wherein the total of all mammal species cell types is 100%. In an aspect, the organ, organoid, or tissue comprises at least 80%, 81%, 82%, 83%, 84%, 85%, 86%, 87%, 88%, 89%, 90%, 91%, 92%, 93%, 94%, 95%, 96%, 97%, 98%, 99%, or more cells of a mammalian species for the target organ.

[0117] In an aspect, the organ, organoid or tissue may be selected from kidney, liver, heart, lung, pancreas, muscle (e.g., skeletal muscle), stomach, intestine, spleen, bladder, reproductive organs, bone marrow, or skin.

### IV. Methods of Manufacture

[0118] In an aspect, the current disclosure also encompasses a method of generating a mammalian organ, organoid, or tissue within an animal of another species. For example, generating a human organ, organoid, or tissue within an animal of a non-human species. The method may comprise: providing a population of one or more cell of a first mammalian species comprising an antigen-recognition domain at the cell membrane, and providing a cell of a second mammalian species comprising cells expressing an antigen at the cell membrane, whereby an interspecies chimera (e.g., chimeric embryo) is generated. The method may comprise: providing a population of one or more cell of a second mammalian species comprising an antigen-recognition domain at the cell membrane, and providing a cell of a first mammalian species comprising cells expressing an antigen at the cell membrane, whereby an interspecies chimera (e.g., chimeric embryo) is generated. In some embodiments the interspecies chimera is a chimeric embryo. In some embodiments the interspecies chimera is a chimeric blastocyst. The method may further comprise culturing the interspecies chimera under conditions that allow the interspecies chimera to develop into the organ, organoid, or tissue mass of the cell of a first mammalian species or the second mammalian species. In certain embodiments, the interspecies chimera is a human and non-human chimera.

[0119] The organ to be produced by the methods described herein may be any solid organ with a fixed shape, such as a kidney, liver, heart, lung, pancreas, muscle (e.g., skeletal muscle), stomach, intestine, spleen, bladder, reproductive organs, bone marrow, or skin. The organ may be produced in the body of a litter by developing totipotent cells or pluripotent cells within an embryonic cell that serves as a recipient. Totipotent cells or pluripotent cells can form organ types by being developed in an embryo. Accordingly, there is no limitation to the solid organ that can be produced depending on the specific type of cells used in the method.

[0120] A method of generating a mammalian organ, organoid, or tissue within another mammalian species may comprise microinjecting one or more stem cell from a first mammalian species into an embryo of the different species, thereby generating a chimeric embryo. The microinjection may comprise injecting the embryo of a host mammal with at least one stem cell of another mammal species, as described herein. A cell of a first mammalian species (e.g., an iPSC) may be injected into an embryo of a second mammalian species. For example, a human cell may be injected into an embryo of a rodent, non-human primate, or ungulate species. When the cells of the first and second mammalian species as described herein are engineered to comprise the antigen or antigen-binding protein, the interspecies chimera may have improved adherence which improves the chances of survival for the growth of the desired mammalian organ, organoid, or tissue, as well as the chances of survival of the host animal. The population of cells or interspecies chimera as described herein may be allogeneic or xenogeneic to the host cell and/or host animal.

[0121] In some aspects, a method of generating a mammalian organ, organoid, or tissue comprises creation of an interspecies chimera. Interspecies chimera may be generated by injection of one or more stem cell of a first mammalian species into an embryo of a second mammalian species. In some embodiments, about 1 to about 3 cells of a first mammalian species, inclusive, are injected into the one or more cell (e.g., embryo) of a second mammalian species. In some embodiments, about 4 to about 6 cells of a first mammalian species, inclusive, are injected into the one or more cell (e.g., embryo) of a second mammalian species. In some embodiments, about 7 to about 9 cells of a first mammalian species, inclusive, are injected into the one or more cell (e.g., embryo) of a second mammalian species. In some embodiments, about 10 to about 12 cells of a first mammalian species, inclusive, are injected into the one or more cell (e.g., embryo) of a second mammalian species. In some embodiments, about 13 to about 15 cells of a first mammalian species, inclusive, are injected into the one or more cell (e.g., embryo) of a second mammalian species. In some embodiments, about 16 to about 18 cells of a first mammalian species, inclusive, are injected into the one or more cell (e.g., embryo) of a second mammalian species. In some embodiments, about 19 to about 21 cells of a first mammalian species, inclusive, are injected into the one or cell (e.g., embryo) of a second mammalian species. In some aspects, once a chimeric embryo is produced it can be propagated for varying periods of time in culture, where it may undergo a series of developmental steps. Methods of culturing animal embryos (e.g., mammalian embryos) are known in the art. For some uses, the embryos can be brought to term, forming the chimeric animals having a mammalian organ, organoid, or tissue of a different species, as described herein.

[0122] The method may further comprise transferring the interspecies chimera into a pseudo-pregnant host mammal which may or may not be the same as the mammalian species from which the interspecies chimera blastocyst was prepared. The pseudo-pregnant host animal may be hormonally prepared. Progression of the development of the interspecies chimera may require implantation and placentation in the host mammal.

[0123] The host animal may be genetically modified, or comprise a gene knockout. In some embodiments, the host animal is knock of a gene involved in organogenesis for the human organ to be produced.

### V. Compositions

[0124] In some aspects, the current disclosure also encompasses pharmaceutical composition comprising a population of cells as described herein, and a pharmaceutically acceptable diluent(s), excipient(s), and/or carrier(s). As used herein, a pharmaceutically acceptable diluent, excipient, or carrier, refers to a material suitable for administration to a subject without causing undesirable biological effects or interacting in a deleterious manner with any of the components of the composition in which it is contained.

[0125] In some aspects, pharmaceutical compositions herein may comprise stabilizers, anti-oxidants, colorants, other medicinal or pharmaceutical agents, carriers, adjuvants, preserving agents, stabilizing agents, wetting agents, emulsifying agents, solution promoters, salts, solubilizers, antifoaming agents, antioxidants, dispersing agents, surfactants, or any combination thereof.

[0126] Techniques for formulation and administration of drugs may be found in “Remington's Pharmaceutical Sciences,” Mack Publishing Co., Easton, Pa., latest edition, which is incorporated herein by reference.

[0127] In certain aspects, pharmaceutical compositions disclosed herein may comprise agents or additives selected from a group including surface-active agents, detergents, solvents, acidifying agents, alkalizing agents, buffering agents, tonicity modifying agents, ionic additives effective to increase the ionic strength of the solution, antimicrobial agents, antibiotic agents, antifungal agents, antioxidants, preservatives, electrolytes, antifoaming agents, oils, stabilizers, enhancing agents, and the like. In some aspects, one or more of these agents may be added to improve the performance, efficacy, safety, shelf-life and/or other property of the population of cells of the present disclosure. In some aspects, additives may be biocompatible, without being harsh, abrasive, and/or allergenic.

### VI. Methods of Treatment

[0128] In some aspects, methods of treatment as disclosed herein may comprise administering to a subject in need thereof a human organ, organoid, or tissue as described herein. The human organ, organoid, or tissue may be manufactured in a non-human animal in accordance to the methods provided herein. The administration may be surgical administration.

[0129] A suitable subject may include may a human in need of replacement of an organ, organoid, or tissue. For example, the human subject may require replacement of a kidney, liver, heart, lung, pancreas, or muscle.

### VII. Sequences

[0130] In some aspects, any composition (e.g., a population of cells, organ, organoid, or tissue) or method as described herein may comprise the entirety of, or part of, any one of the sequences as described herein, or a sequence presented in the SEQUENCE TABLE presented below:

SEQUENCE TABLE

| SEQ | | | |
|---|---|---|---|
| ID | | | |
| NO | Type | Description | Sequence |
| 1 | Signal | Acrosin membrane signaling | MVEMLPTVAVLVLAVSVVAKDNTT |
| | | peptide (used for Nano-GPI | |
| | | constructs) | |
| 2 | Signal | CD8 membrane signaling | MASPLTRFLSLNLLLLGESIILGSGEA |
| | | peptide (used for Nano-CD8 | |
| | | constructs) | |
| 3 | Signal | Integrin membrane signaling | MNLQPIFWIGLISSVCCVFA |
| | | peptide (used for Nano-ITGB1 | |
| | | constructs) | |
| 4 | Signal | Cldn6 signal peptide (used for | MASTGLQILGIVLTLLGWVNA |
| | | Nano-Cldn6 constructs) | |
| 5 | Linker | Linker between membrane | LQEFATMQ |
| | | peptide and nanobody (used for | |
| | | Nano-GPI constructs) | |
| 6 | Linker | Linker between nanobody and | QLEN |
| | | GPI anchor signal (used for | |
| | | Nano-GPI constructs) | |
| 7 | Linker | Linker between Cldn6 signal | LVSCALPMWMWKVTAFIGN |
| | | peptide and nanobody (used for | |
| | | Nano-Cldn6 constructs) | |
| 8 | Lipid | GPI anchor (signal peptide from | GGISLLVQNTSWMLLLLLSLSLLQALDFISL |
| | Anchor | Thy-1 that marks protein for | |
| | | post-translational GPI addition) | |
| 9 | Anchor | CD8 anchor (transmembrane seq + | KPQAPELRIFPKKMDAELGQKVDLVCEVLGSVS |
| | Protein | c terminus) | QGCSWLFQNSSSKLPQPTFVVYMASSHNKITWD |
| | | | EKLNSSKLFSAMRDTNNKYVLTLNKFSKENEGY |
| | | | YFCSVISNSVMYFSSVVPVLQKVNSTTTKPVLRT |
| | | | PSPVHPTGTSQPQRPEDCRPRGSVKGTGLDFACD |
| | | | IYIWAPLAGICVALLLSLIITLICYH |
| 10 | Anchor | ICAM1 anchor (transmembrane | IVIITVVAAAVIMGTAGLSTYLYNRQRKIKKYRL |
| | Protein | seq) | QQAQKGTPMKPNTQATPP |
| 11 | Anchor | ITGB1 anchor (transmembrane | VENPECPTGPDIIPIVAGVVAGIVLIGLALLLIWKL |
| | Protein | seq) | LMIIHDRREFAKFEKEKMNAKWDTGENPIYKSA |
| | | | VTTVVNPKYEGK |
| 12 | Anchor | E-Cadherin anchor | SILGILGGILALLILILLLLLFLRRRAVVKEPLLPPE |
| | Protein | (transmembrane seq + c | DDTRDNVYYYDEEGGGEEDQDFDLSQLHRGLD |
| | | terminus) | ARPEVTRNDVAPTLMSVPRYLPRPANPDEIGNFI |
| | | | DENLKAADTDPTAPPYDSLLVFDYEGSGSEAASL |
| | | | SSLNSSESDKDQDYDYLNEWGNRFKKLADMYG |
| | | | GGEDD |
| 13 | Anchor | Cldn6 anchor (transmembrane | ALPQDLQAARALCVVTLLIVLLGLLVYLAGAKC |
| | Protein | seq + c terminus) | TTCVEDRNSKSRLVLISGIIFVISGVLTLIPVCWTA |
| | | | HSIIQDFYNPLVADAQKRELGASLYLGWAASGL |
| | | | LLLGGGLLCCACSSGGTQGPRHYMACYSTSVPH |
| | | | SRGPSEYPTKNYV |
| 14 | Antigen | wtGFP | MASKGEELFTGVVPILVELDGDVNGHKFSVSGE |
| | | | GEGDATYGKLTLKFICTTGKLPVPWPTLVTTFGY |
| | | | GVQCFARYPDHMKQHDFFKSAMPEGYVQERTIF |
| | | | FKDDGNYKTRAEVKFEGDTLVNRIELKGIDFKED |
| | | | GNILGHKLEYNYNSHNVYIMADKQKNGIKVNFK |
| | | | IRHNIEDGSVHLADHYQQNTPIGDGPVLLPDNHY |
| | | | LSTQSALSKDPNEKRDHMVLLEFVTAAGITHGM |
| | | | DELYKGLEVLFQGPSHHHHHH |
| 15 | Antigen | GFPuv | MSKGEELFTGVVPILVELDGDVNGHKFSVSGEG |
| | | | EGDATYGKLTLKFICTTGKLPVPWPTLVTTFSYG |
| | | | VQCFSRYPDHMKRHDFFKSAMPEGYVQERTISF |
| | | | KDDGNYKTRAEVKFEGDTLVNRIELKGIDFKED |
| | | | GNILGHKLEYNYNSHNVYITADKQKNGIKANFKI |
| | | | RHNIEDGSVQLADHYQQNTPIGDGPVLLPDNHY |
| | | | LSTQSALSKDPNEKRDHMVLLEFVTAAGILEHH |
| | | | HHHH |
| 16 | Antigen | GFPuv_M | MSKGEELFTGVVPILVELDGDVNGHKFSVSGEG |
| | | | EGDATYGKLTLKFICTTGKLPVPWPTLVTTFSYG |
| | | | VQCFSRYPDHMKRHDFFKSAMPEGYVQERTISF |
| | | | KDDGNYKTRAEVKFEGDTLVNRIELKGIDFKED |
| | | | GNILGHKLEYNYNSHNVYITADKQKNGIKANFKI |
| | | | RHNIEDGSVQLADHYQQNTPIGDGPVLLPDNHY |
| | | | LSTQSKLSKDPNEKRDHMVLLEFVTAAGILEHH |
| | | | HHHH |
| 17 | Nanobody | vhhGFP4 | VQLVESGGALVQPGGSLRLSCAASGFPVNRYSM |
| | | | RWYRQAPGKEREWVAGMSSAGDRSSYEDSVKG |
| | | | RFTISRDDARNTVYLQMNSLKPEDTAVYYCNVN |
| | | | VGFEYWGQGTQVTVSS |
| 18 | Nanobody | LaG-2 | MAQVQLVESGGGLVQAGGSLRLSCAASGRTFSN |
| | | | YAMGWFRQAPGKEREFVAAISWTGVSTYYADS |
| | | | VKGRFTISRDNDKNTVYVQMNSLIPEDTAIYYCA |
| | | | AVRARSFSDTYSRVNEYDYWGQGTQVTV |
| 19 | Nanobody | LaG-3 | MAQVQLVESGGGLVQAGGSLRVSCAASGRTYS |
| | | | DYAMGWFRQAPGKERDFVAGISGSGGDTYYAD |
| | | | SVKGRFTISRDNAKNTMYLQMNSLKPEDTAVYF |
| | | | CAARTGTVLFTSRVDYRYWGQGTQVTV |
| 20 | Nanobody | LaG-5 | QVQLVESGGGLVQAGGSLRLSCAASGSIFSSNA |
| | | | MAWYRQTPEKQRELICDITRGGITKCADSVKGRF |
| | | | TISRDNTKNTVYLQMNSLKSEDTAVYYCAAKSE |
| | | | GYFGFPRVENEYPYWGQGTQVTV |
| 21 | Nanobody | LaG-6 | MAQVQLVESGGGLVQAGGSLRLSCAASGRTFST |
| | | | SAMAWFRQAPGKEREFAAGITWISSSTYYTDSV |
| | | | KGRFTISRDNAKNTVYLQMNSLKPEDTAVYYCA |
| | | | AKSEGYFGFPRVENEYPYWGQGTQVTV |
| 22 | Nanobody | LaG-8 | MAQVQLVESGGGLVQHGGSLRLSCVTSGFTFDI |
| | | | HDMGWFRQAPGKERDIVARISKSGDITYYADSV |
| | | | KGRFIISRDNTKNTVYLQMNSLKPEDTAVYYCA |
| | | | ATLRATITSFDEYVYRGQGTQVTVS |
| 23 | Nanobody | LaG-9 | MADVQLVESGGGLVQAGGSLRLSCAASGRTFST |
| | | | SAMGWFRQAPGKEREFVARITWSAGYTAYSDSV |
| | | | KGRFTISRDKAKNTVYLQMNSLKPEDTAVYYCA |
| | | | SRSAGYSSSLTRREDYAYWGQGTQVTVS |
| 24 | Nanobody | LaG-10 | MAQVQLVESGGGLVQAGDSLQLSCAFSGGTFST |
| | | | YAMGWFRQAPGKEREFVGGISRSGATTNYEDSV |
| | | | KGRFTISKDNTKNTVYLQLNSLKPEDTAVYYCA |
| | | | ARNNILPVTTIDKYEYWGQGTQVTV |
| 25 | Nanobody | LaG-11 | MADVQLVESGGRSVRAGDSLRLSCLASGGTFSL |
| | | | YAMGWFRQAPGKEREFVAAVTWSGGSTYYTDS |
| | | | VKGRFSISRDNAKNTVYLQMNSLKPEDTAVYYC |
| | | | AVRTSGFFGSIPVTERAFDYWGQGTQVTVS |
| 26 | Nanobody | LaG-12 | MASGAAGGGLGEGLVQAGGSLRLSCAASGRTF |
| | | | NSYPMAWFRQAPGKEREFVAALGWSGGSTDYA |
| | | | DSVKGRFTISRDNSKNTVYLEMNSLKPDDTGVY |
| | | | YCALRRRGGVYNTYSGEKDYDYWGQGTQVTVS |
| 27 | Nanobody | LaG-17 | MAQVQLVESGGGLVQAGGSLRLSCAASGRTYSI |
| | | | SAMGWFRQAPGKEREFVAGISRSGGTTYYADPV |
| | | | KGRFTISRDNAKNTVYLQMNSLKPEDTAVYYCA |
| | | | ARARGWTTFPAREIEYDYWGQGTQVTV |
| 28 | Nanobody | LaG-18 | MAQVQLVESGGGLVQTGGSLKLSCTASVRTLSY |
| | | | YHVGWFRQAPGKEREFVAGIHRSGESTFYADSV |
| | | | KGRFTISRDNAKNTVHLQMNSLKPEDTAVYYCA |
| | | | QRVRGFFGPLRSTPSWYDYWGQGTQVTVS |
| 29 | Nanobody | LaG-43 | MADVQLVESGGGLVQPGGSLRLSCEASGGAFST |
| | | | VAMGWFRQAPGKEREFVGAITWTAGSTYYADS |
| | | | AKGRFTISRDNAKNTVHLQMNSLKPEDTAVYYC |
| | | | AQRVRGFFGPLRTTPSWYEYWGQGTQVTVS |
| 30 | Nanobody | LaG-19 | MAQVQLVESGGGLVQAGGSLRLSCAASGPTGA |
| | | | MAWFRQAPGKEREFVGGISRSGTDTYYVDSVKG |
| | | | RFTIDRDNAKNTVYLQMNSLKPEDTAVYYCAAR |
| | | | RSQILFTSRTDYEFWGQGTQVTV |
| 31 | Nanobody | LaG-21 | MAQVQLVESGGGLVQAGGSLRLSCAASGPTGA |
| | | | MAWFRQAPGMEREFVGGISGSETDTYYADFVK |
| | | | GRLTVDRDNVKNTVDLQMNSLKPEDTAVYYCA |
| | | | ARRRVTLFTSRADYDFWGQGTQVTVS |
| 32 | Nanobody | LaG-42 | MADVQLVESGGGLVQAGDSLRLSCAASGPTGA |
| | | | MAWFHQGLGKEREFVGGISPSGDNIYYADSVKG |
| | | | RFTIDRDNAKNTVSLQMNSLKPEDMGVYYCAA |
| | | | RRRVTLFTSRTDYEFWGRGTQVTVS |
| 33 | Nanobody | LaG-24 | MADVQLVESGGGLVQPGGSLRLSCAASGEIASII |
| | | | AIGWYRQAPGKQRESVALITRSGMITYGDSAQG |
| | | | RFTISRDDAKNTVYLHMDDLVPEDTAVYYCNAK |
| | | | KVSFGDYWGQGTQVTVS |
| 34 | Nanobody | LaG-26 | MAQVQLVESGGGLVQAGASMRLSCAASGITFSL |
| | | | YHWVWFRQAAGREHEFVAGIIRSGGETLSADSV |
| | | | KDRFIISRDDAKNTLYLQMNMLQPEDTATYYCA |
| | | | ATHRADWYSSAFREYIFRGQGTQVTVS |
| 35 | Nanobody | LaG-27 | MADVQLVESGGGLVQAGGSLRLSCTASGLTIST |
| | | | YNIGWFRQAPGKEREFVGIIIRNGDTTYYADSVK |
| | | | GRFTISRDNAKNTVYLQMNSVKPADAAVYSCGA |
| | | | TVRAGAAAEQYNSYIFRGQGTQVTV |
| 36 | Nanobody | LaG-29 | MAQVQLVESGGGLVQAGAALRLSCAASGGTFSF |
| | | | YNMGWFRQAPGKEREFVVSISRSGGGTAYADSV |
| | | | KGRFTISRDNAKNTAYLQMNSLKPEDTAVYYCA |
| | | | AGLRDWGREGEPHYWGQGTQVTVS |
| 37 | Nanobody | LaG-30 | MAQVQLVESGGGLVQAGGSLRLSCAASGRTFST |
| | | | SAMGWFRQAPGREREFVAAITWTVGNTIYGDSM |
| | | | KGRFTISRDRTKNTVDLQMDSLKPEDTAVYYCT |
| | | | ARSRGFVLSDLRSVDSFDYKGQGTQVTVS |
| 38 | Nanobody | LaG-35 | MADVQLVESGGGLVQAGGSLRLSCTVSGRTFSN |
| | | | YAMGWFRQAPGKEREFVAGISWTGGHTLYTDS |
| | | | VKGRFTISRDNAKNTVYLQMNSLKPEDTALYYC |
| | | | AADRAADFFAQRDEYDYWGQGTQVTVS |
| 39 | Nanobody | LaG-37 | MAQVQFVESGGGTVQDGDFLRLSCTASGDTFSN |
| | | | YHAGWFRQPPGREREFVAAISWTGEGTLYADSV |
| | | | KGQFTISRDNAKNAMYLQMNRLKPEDTAVYYC |
| | | | AAARSVGFTWRSSKSNDYAYWGQGTQVTV |
| 40 | Nanobody | LaG-41 | MADVQLVESGGGLVQAGGSLRLSCAASGPTGA |
| | | | MAWFRQAPGKEREFVGGISGSETDTYYVDSVKG |
| | | | RFTVDRDNVKNTVYLQMNSLKPEDTAVYYCAA |
| | | | RRRITLFTSRTDYDFWGRGTQVTV |
| 41 | Nanobody | LaM-2 | MAQVQLVESGGGLVQAGGSLRLSCATSGFTFSD |
| | | | YAMGWFRQAPGKEREFVAAISWSGHVTDYADS |
| | | | VKGRFTISRDNVKNTVYLQMNSLKPEDTAVYSC |
| | | | AAAKSGTWWYQRSENDFGSWGQGTQVTVSKE |
| | | | AI |
| 42 | Nanobody | LaM-3 | MAQVQLVQSGGGLVQAGGSLRLSCAASGRTFSD |
| | | | IAVGWFRQTPGKEREFVAAISWSGLIINYGDSVE |
| | | | DRFTISRDNAKSAVYLQMNSLKPEDTAVYYCAA |
| | | | RIGMNYYYAREIEYPYWGQGTQVTVSKCY |
| 43 | Nanobody | LaM-4 | MAQVQLVESGGSLVQPGGSLRLSCAASGRFAES |
| | | | SSMGWFRQAPGKEREFVAAISWSGGATNYADSA |
| | | | KGRFTLSRDNTKNTVYLQMNSLKPDDTAVYYC |
| | | | AANLGNYISSNQRLYGYWGQGTQVTVSSPFT |
| 44 | Nanobody | LaM-6 | MAQVQLVESGGGLVQAGGSLRLSCVASGSAPSF |
| | | | FAMAWYRQSPGNERELVAALSSLGSTNYADSVK |
| | | | GRFTISMDNAKNTVYLQMNNVNAEDTAVYYCA |
| | | | AGDFHSCYARKSCDYWGQGTQVTVS |
| 45 | Nanobody | LaM-8 | MAQVQLVESGGGLVQAGGSLRLSCAVSGRPFSE |
| | | | YNLGWFRQAPGKEREFVARIRSSGTTVYTDSVK |
| | | | GRFSASRDNAKNMGYLQLNSLEPEDTAVYYCA |
| | | | MSRVDTDSPAFYDYWGQGTQVTVSTPRS |
| 46 | Vector | PB_TRE3G Promoter_GFP | See Sequence Listing |
| | | Nano_hICAM1_HA_EF1a | |
| | | Promoter_Tet-on | |
| | | 3G_PuroR_AmpR | |
| 47 | Vector | PB_TRE3G Promoter_Nano | See Sequence Listing |
| | | LAG5 | |
| | | (Kd = 14,200 nM)_hICAM1_HA | |
| | | EF1a Promoter_Tet-on | |
| | | 3G_PuroR_AmpR | |
| 48 | Vector | PB_TRE3G Promoter_Nano | See Sequence Listing |
| | | LAG6 | |
| | | (Kd = 310 nM)_hICAM1_HA_EF1a | |
| | | Promoter_Tet-on | |
| | | 3G_PuroR_AmpR | |
| 49 | Vector | PB_TRE3G Promoter_Nano | See Sequence Listing |
| | | LAG8(Kd = 20,000 nM)_hICAM1_ | |
| | | HA_EF1a Promoter_Tet-on | |
| | | 3G_PuroR_AmpR | |
| 50 | Vector | PB_TRE3G Promoter_Nano | See Sequence Listing |
| | | LAG10(Kd = 97nM)_hICAM1_HA_ | |
| | | EF1a Promoter_Tet-on | |
| | | 3G_PuroR_AmpR | |
| 51 | Vector | PB_TRE3G Promoter_Nano | See Sequence Listing |
| | | LAG11(Kd = 22,900 nM)_hICAM1_ | |
| | | HA_EF1a Promoter_Tet-on | |
| | | 3G_PuroR_AmpR | |
| 52 | Vector | PB_TRE3G Promoter_Nano | See Sequence Listing |
| | | LAG17 | |
| | | (Kd = 50 nM)_hICAM1_HA_EF1a | |
| | | Promoter_Tet-on | |
| | | 3G_PuroR _mpR | |
| 53 | Vector | PB_TRE3G Promoter_Nano | See Sequence Listing |
| | | LAG18 | |
| | | (Kd = 3,800 nM)_hICAMI_HA_ | |
| | | EF1a Promoter_Tet-on | |
| | | 3G_PuroR_AmpR | |
| 54 | Vector | PB_TRE3G Promoter_Nano | See Sequence Listing |
| | | LAG27(Kd = 9.5 nM)_hICAM1_ | |
| | | HA_EF1a Promoter_Tet-on | |
| | | 3G_PuroR_AmpR | |
| 55 | Vector | PB_TRE3G Promoter_Nano | See Sequence Listing |
| | | LAG29 | |
| | | (Kd = 110 nM)_hICAM1_HA_EF1a | |
| | | Promoter_Tet-on | |
| | | 3G_PuroR_AmpR | |
| 56 | Vector | PB_TRE3G Promoter_Nano | See Sequence Listing |
| | | LAG30 | |
| | | (Kd = 0.5 nM)_hICAM1_HA_EF1a | |
| | | Promoter_Tet-on | |
| | | 3G_PuroR_AmpR | |
| 57 | Vector | PB_TRE3G Promoter_Nano | See Sequence Listing |
| | | LAG42 | |
| | | (Kd = 600 nM)_hICAM1_HA_ | |
| | | EF1a Promoter_Tet-on | |
| | | 3G_PuroR_AmpR | |
| 58 | Vector | PB_CAG | See Sequence Listing |
| | | Promoter_EGFP_hICAM1_Amp | |
| | | R | |
| 59 | Vector | PB_Primed Oct4 | See Sequence Listing |
| | | Promoter_EGFP_hICAM1_Amp | |
| | | R | |
| 60 | Vector | cag-pb-itr-v2-gfp-cd8 | See Sequence Listing |
| 61 | Vector | cag-pb-itr-v2-gfp-gpi | See Sequence Listing |
| 62 | Vector | cag-pb-itr-v2-nuc-mko | See Sequence Listing |
| 63 | Vector | cag-pb-itr-v2-nuc-mko-nano-cd8 | See Sequence Listing |
| 64 | Vector | cag-pb-itr-v2-nuc-mko-nano-gpi | See Sequence Listing |
| 65 | Vector | cag-pb-itr-v2 | See Sequence Listing |
| 66 | Vector | cag-pb-itr-v2-nano-cd8 | See Sequence Listing |
| 67 | Vector | cag-pb-itr-v2-nano-gpi-chromo- | See Sequence Listing |
| | | version | |
| 68 | Vector | gfp-cd8-constitutive | See Sequence Listing |
| 69 | Vector | gfp-gpi-puro | See Sequence Listing |
| 70 | Vector | gfp-morphotrap-cd8 | See Sequence Listing |
| 71 | Vector | nanobody-gpi-puro | See Sequence Listing |
| 72 | Vector | nano-cd8-constitutive | See Sequence Listing |
| 73 | Vector | pds0226-real-version | See Sequence Listing |
| 74 | Vector | pds0227-real-version | See Sequence Listing |
| 75 | Vector | pds0229-real-version | See Sequence Listing |
| 76 | Vector | cag-pb-itr-v2-gfp-ecad-in-frame- | See Sequence Listing |
| | | 5-25-22 | |
| 77 | Vector | cag-pb-itr-v2-gfp-ecad-new- | See Sequence Listing |
| | | version-522 | |
| 78 | Vector | cag-pb-itr-v2-nano-ecad-new- | See Sequence Listing |
| | | version-522 | |
| 79 | Vector | gfp-cldn6-hybrid-construct | See Sequence Listing |
| 80 | Vector | gfp-e-cadherin-c-terminus | See Sequence Listing |
| 81 | Vector | gfp-mecad-in-frame-n-term | See Sequence Listing |
| 82 | Vector | nanobody-cldn6-hybrid- | See Sequence Listing |
| | | construct | |
| 83 | Vector | nanobody-e-cadherin-c-hybrid | See Sequence Listing |
| 84 | Vector | nano-mecad-in-frame-n-term | See Sequence Listing |
| 85 | Vector | cag-itr-piggybac-plasmid | See Sequence Listing |
| 86 | Vector | cag-pb-itr-v2-gfp-itgb1 | See Sequence Listing |
| 87 | Vector | cag-pb-itr-v2-mcherry-cd8 | See Sequence Listing |
| 88 | Vector | cag-pb-itr-v2-mcherry- | See Sequence Listing |
| | | cytoplasmic | |
| 89 | Vector | cag-pb-itr-v2-mcherry-gpi | See Sequence Listing |
| 90 | Vector | cag-pb-itr-v2-mcherry-nano- | See Sequence Listing |
| | | itgb1 | |
| 91 | Vector | cag-pb-itr-v2-mcherry-nuclear | See Sequence Listing |
| 92 | Vector | cag-pb-itr-v2-nuc-mcherry- | See Sequence Listing |
| | | nano-gpi | |
| 93 | Vector | gfp-c6-and-nanobody-c6-same- | See Sequence Listing |
| | | plasmid | |
| 94 | Vector | gfp-cd8-ki-v2 | See Sequence Listing |
| 95 | Vector | gfp-cd8-ki-v3 | See Sequence Listing |
| 96 | Vector | gfp-cd8-knock-in | See Sequence Listing |
| 97 | Vector | gfp-cldn6-hybrid-construct- | See Sequence Listing |
| | | short-version | |
| 98 | Vector | gfp-pdgfr-in-morphotrap-vector | See Sequence Listing |
| 99 | Vector | human-nano-cd8-ki | See Sequence Listing |
| 100 | Vector | human-nano-gpi-chromo-ki | See Sequence Listing |
| 101 | Vector | mouse-rosa26-gfp-cd8 | See Sequence Listing |
| 102 | Vector | mouse-rosa26-gfp-gpi | See Sequence Listing |
| 103 | Vector | mouse-rosa26-gfp-ki | See Sequence Listing |
| 104 | Vector | mouse-rosa26-nano-cd8 | See Sequence Listing |
| 105 | Vector | mouse-rosa26-nano-mko-gpi | See Sequence Listing |
| 106 | Vector | nanobody-cldn6-hybrid- | See Sequence Listing |
| | | construct-short-version | |
| 107 | Vector | nanobody-linker-gpi-puro | See Sequence Listing |
| 108 | Vector | nanobody-pdgfr-in-morphotrap- | See Sequence Listing |
| | | vector | |
| 109 | Vector | nano-cd8-ki-v2 | See Sequence Listing |
| 110 | Vector | nano-cd8-ki-v3 | See Sequence Listing |
| 111 | Vector | nano-gpi-chromo-ki-constitutive | See Sequence Listing |
| 112 | Vector | nano-gpi-ki-mcherry-fusion | See Sequence Listing |
| 113 | Vector | nano-mecad | See Sequence Listing |

### EXAMPLES

[0131] The following examples are included to demonstrate preferred embodiments of the disclosure. It should be appreciated by those of skill in the art that the techniques disclosed in the examples that follow represent techniques discovered by the inventor to function well in the practice of the present disclosure, and thus can be considered to constitute preferred modes for its practice. However, those of skill in the art should, in light of the present disclosure, appreciate that many changes can be made in the specific embodiments which are disclosed and still obtain a like or similar result without departing from the spirit and scope of the present disclosure.

### Example 1: Incompatibility in Cell Adhesion Constitutes a Barrier to Interspecies Chimerism

[0132] Interspecies blastocyst complementation holds great potential to address the global shortage of human organs for transplant by growing human tissues and organs in animals. However, a major challenge in this approach is the limited chimerism of human cells in evolutionarily distant animal hosts due to a myriad of xenogeneic barriers. One key obstacle is the disparity in cell adhesion, as human cells struggle to form adhesive junctions with animal cells, both in culture and when introduced into mouse embryos. To overcome this barrier, a synthetic biology strategy was developed that leverages nanobody-antigen interactions to artificially enhance cell adhesion. Cells were engineered to express nanobodies and their corresponding antigens in the outer plasma membrane, which significantly improved the bonding between different species' PSCs during in vitro cell adhesion assays and increased the chimerism of human PSCs in mouse embryos. Manipulation of interspecies pluripotent cell adhesion provides valuable insights into the dynamics of cell interaction in chimera formation and early embryonic development.

[0133] Blastocyst complementation is a strategy to address the worldwide shortage of donor organs. This technique involves using pluripotent stem cells (PSCs) to complement an organogenesis-disabled host embryo, leading to donor cell enrichment in the emptied developmental organ niche (Zhen et al., Development (2021), 148). Initially developed for studying gene function within the same species (Chen et al., Proc Natl Acad Sci (1993), 90:4528-4532), blastocyst complementation has recently been adopted for interspecies organogenesis, which involves transplanting donor PSCs from one species into the embryo of another species to grow a specific organ. Although successful in generating functional tissues like the pancreas (Kobayashi et al., Cell (2010), 142:787-799; Yamaguchi et al., Nature (2017), 542:191-196; Wu et al., Cell (2017), 168:473-486), kidney (Goto et al., Nat Commun (2019), 10:451), and forebrain (Huang et al., bioRxiv (2023)) between closely related rats and mice, applying this technique to more evolutionarily distant species has faced significant challenges due to various xenogeneic barriers.

[0134] Some of these barriers have been previously characterized, including cell competition and developmental timing. Cell competition was recently identified as a barrier to interspecies chimerism, where mouse PSCs become “winners” and induce apoptosis in the “loser” human PSCs upon cell-cell contact (Zheng et al., Nature (2021), 592:272-276). Regarding developmental timing, human PSCs differentiate at a slower rate than mouse PSCs and maintain their species-specific developmental pace during teratoma formation within a mouse host (Barry et al., Dev Biol (2017), 423:101-110). Consequently, they may struggle to keep up with the rapid pace of differentiation during mouse embryogenesis. However, a recent study showed that the differentiation of hPSCs is somewhat accelerated during co-differentiation with mouse PSCs (Brown et al., PLOS Comput Biol (2021), 17). Other potential components of the xenogeneic barrier that have not yet been investigated in detail include mismatches between ligands and receptors from different species and incompatibility in cell adhesion. Cell adhesion plays a pivotal role in tissue and organ formation during development (Halbleib and Nelson, Genes Dev (2006), 20:3199-3214), and its disruption is associated with various developmental disorders (Petruzzelli et al., Am J Med (1999), 106:467-476). Differential cell adhesion due to mismatches in cell adhesion molecules (CAMs) may hinder the effective integration of donor PSCs from an evolutionarily distant species with host epiblast cells, thereby inhibiting their chimeric contribution to host embryos.

### Human Cells Perish in Chimeric Blastocysts Cultured In Vitro

[0135] Experiments were conducted to study cell adhesion barriers. Mouse blastocysts were cultured in vitro following the injection of human induced pluripotent stem cells (hiPSCs). In many instances, the human cells perished within the first three days post-injection, likely due to cell competition, a form of “quality control” during primed pluripotency (Zheng et al., Nature (2021), 592:272-276; Baker, Nat Rev Genet (2020), 21:683-697). Remarkably, when human cells did survive, they predominantly localized at the periphery of the embryo, rather than within the epiblast (FIG. 1A). During the transition from naïve to primed pluripotency, epiblast cells undergo mesenchymal-to-epithelial transition (MET) (Sheng, Dev Biol (2015), 401:17-24) and are held together by strong anchoring junctions, such as tight and adherens junctions. This extrusion of human cells from the embryo may be attributed to their inability to form adhesive junctions with mouse epiblast cells, which would impede their participation in subsequent developmental processes (FIG. 3A).

### Adhesion of Human Cells in Co-Cultures

[0136] To study the cell adhesion barrier in greater detail, PSCs from different species were co-cultured. Staining was performed on mouse epiblast stem cells (mEpiSCs) (Wu et al., Nature (2015), 521:316-321) and hiPSCs (Wu et al., Cell (2017), 168:473-486) co-cultured in NBFR medium (which maintains cells in the primed state of pluripotency) for markers of tight junctions (ZO1) and adherens junctions (E-cadherin). The junctions were found to predominantly form between cells of the same species, whereas junction formation was significantly less frequent at the interfaces between mouse and human cells (FIG. 1B). Further analysis was conducted using correlative light-electron microscopy (CLEM) to observe the co-cultured mEpiSCs and hiPSCs at higher magnification. The results showed that cells of the same species maintained direct contact along substantial portions of their membranes. In contrast, interactions between mouse and human cells were characterized by numerous gaps, with only limited areas of direct membrane contact (FIG. 1C).

[0137] To quantify interspecies PSC adhesion, a modified doublet flow cytometry assay (Segal and Stephany, Cytometry (1984), 5:169-181; Burshtyn and Davidson, Methods Mol Biol (2010), 612:89-96) was adapted for use in testing. This assay measures the percentage of cell pairs (doublets) composed of both a red and a green cell, which can originate from the same or different species (FIGS. 1D and 3F). Results from this assay revealed that rodent (mouse/rat) EpiSCs and primate (human, chimpanzee and rhesus macaque) PSCs showed poor adhesion to one another, while higher percentages of dual-colored doublets were obtained from cells of the same species or from closely related species, such as mouse and rat, human and chimpanzee, or human and rhesus monkey

[0138] (FIGS. 1E and 3G). These initial studies were performed in primed cells, and then the doublet assay was performed using naïve PSCs cultured in the 4CL condition (Mazid et al., Nature (2022), 605:315-324) and randomly differentiating PSCs after one week of culture in serum-containing medium. It was discovered that the interspecies adhesion incompatibility was most pronounced in primed PSCs and less evident in naïve PSCs. Intriguingly, after a week of differentiation, no notable differences in adhesion were observed between mouse-mouse and mouse-human pairs (FIG. 1F).

[0139] These findings of an interspecies adhesion barrier were further supported by other cell adhesion assays, including the 3D co-aggregation assay and the wash assay. The 3D co-aggregation assay is based on the differential adhesion hypothesis, which suggest that cells with strong mutual adhesion will mix uniformly, while those with weaker adhesion tendencies will form separate clusters or layers (Steinberg, Science (1963), 141:401-408; Foty and Steinberg, Dev Biol (2005), 278:255-263). Similar assays have been used previously to examine adhesion between neural stem cells at different stages of differentiation (Karpowicz et al., J Neurosci (2007), 27:5437-5447), and between cells isolated from different germ layers in zebrafish embryos (Schotz et al., HFSP J (2008), 2:42-56). The 3D co-aggregation assay was performed on several combinations of rodent, primate, and ungulate species. The results showed that co-cultured PSCs from the same species or closely related species, such as mouse and rat or human and chimpanzee, tended to distribute themselves evenly, resulting in high percentages of fully intermixed aggregates. However, PSCs from more evolutionarily distant species, like human and mouse or human and pig, tended to remain segregated (FIGS. 1H-1I, 3B-3E). Interestingly, aggregates of human and rhesus monkey PSCs also remained predominantly segregated, despite both being primate species. This may be attributed to the evolutionary distance separating these two species, approximately 28.8 million years ago (MYA), compared to ˜13.1 MYA between mouse and rat or ˜6.4 MYA between human and chimpanzee (Steppan et al., Syst Biol (2004), 53:533-553; Rhesus Macaque Genome et al., Science (2007) 316, 222-234).

### Development of a Nanobody Based Adhesion System

[0140] The wash assay, which has previously been used to measure cell adhesion to substrates like protein-coated surfaces or cell monolayers (Butler et al., Methods Mol Biol (2009). 467:211-228; Chen et al., Cancer Res (2009), 69:3713-3720), was adapted for use as a cell-adhesion assay. This assay quantified the number of mEpiSCs expressing membrane-localized GFP (Rhee et al., Genesis (2006), 44:202-218) anchored by glycosylphosphatidylinositol [GPI] (GFP-GPI mEpiSCs) that remained adhered to a confluent monolayer of red fluorescent mEpiSCs or hiPSCs. The assay involved plating GFP-GPI mEpiSCs on top of the red fluorescent mEpiSC/hiPSC monolayer and allowing a brief 30-minute incubation period for cell attachment. The wells were then washed with PBS to remove any unattached cells and imaged using a fluorescent microscope to quantify the remaining GFP-GPI mEpiSCs (FIG. 1J). The results showed that only a limited number of GFP-GPI mEpiSCs adhered to the hiPSC monolayer, while a larger number adhered to the mEpiSC monolayer (FIG. 1K-1L).

[0141] Cell adhesion incompatibility between PSCs of different species may occur because of structural and expression-level variations in CAMs. Modifying CAMs of hPSCs to match those of the host species was proposed as a solution, but it is impractical due to the diverse and dynamic nature of CAM expression during development. Instead, a synthetic biology approach utilizing membrane-tethered nanobody-antigen interactions to enhance cell adhesion. nanobodies, derived from camelid antibodies, are single-domain fragments known for their versatile expression and ability to bind small antigens (Beghein and Gettemans, Front Immunol (2017), 8:771). In this method, cells from one species express a membrane-bound nanobody, while cells from another species display the corresponding membrane-bound antigen, facilitating strong nanobody-antigen interactions upon contact (FIG. 1M). This strategy was originally developed to induce artificial cell adhesion in bacterial systems and has recently been extended to mammalian models (Glass and Riedel-Kruse, Cell (2018), 174:649-658; Stevens et al., Nature (2023), 614:144-152). However, applying this synthetic biology approach to enhance adhesion between cells from different species (e.g., a human cell and a non-human cell), and to improve chimeric contribution of hPSCs in animal embryos remains an unmet need.

[0142] To this end, naïve mouse embryonic stem cells (mESCs), primed mEpiSCs, H9 human embryonic stem cells (hESCs) (Thomson et al., Science (1998), 282:1145-1147), and human foreskin fibroblast (HFF)-iPSCs (Wu et al., Cell (2017), 168:473-486) were engineered to express the high-affinity vhhGFP4 anti-GFP nanobody (Kubala et al., Protein Sci (2010), 19:2389-2401) on their outer surface. Different methods were utilized to anchor the nanobody to the plasma membrane, including a peripheral GPI anchor (Rhee et al., Genesis (2006), 44:202-218) in hiPSCs and the transmembrane domain from the CD8 protein (Harmansa et al., Elife (2017), 6) in hESCs (FIG. 3H). The membrane localization and the ability of both the GPI- and CD8-anchored anti-GFP nanobodies to bind purified GFP protein was confirmed (FIGS. 31-3J). Importantly, expressing these membrane-anchored anti-GFP nanobodies did not compromise the pluripotency and self-renewal capabilities of the PSCs (FIGS. 3K-3M).

[0143] Using the doublet flow cytometry assay, it was observed that hPSCs expressing anti-GFP nanobodies exhibited significantly higher adhesion rates to GFP-GPI mEpiSCs compared to wild-type (WT) hPSCs. Remarkably, these adhesion rates were on par with, or even exceeded, those observed in same-species cell interactions (FIGS. 1N and 3N).

### In-Vitro Testing of the Nanobody Based Adhesion System

[0144] The functioning of the nanobodies in facilitating cell-adhesion was next tested via in-vitro assay systems. In the 3D co-aggregation assay, replacing WT hiPSCs with Nano-GPI hiPSCs or Nano-CD8 hESCs significantly increased the percentage of fully intermixed aggregates (FIGS. 10-1P). These levels were comparable to aggregates formed from PSCs of a single species. The Nano-GPI was observed to have no effect on cell morphology, and the Nano-CD8 induced slight membrane blebbing and deformation (data not shown). In the wash assay, a considerable number of GFP-GPI mEpiSCs remained attached after washing when the underlying monolayer consisted of either Nano-GPI or Nano-CD8 hiPSCs, compared to WT hiPSCs (FIGS. 1Q-1R). Significantly, the adherence level of GFP-GPI mEpiSCs to a monolayer of Nano-GPI hiPSCs or Nano-CD8 hESCs was markedly higher than when these cells were plated onto a monolayer of mEpiSCs (FIGS. 1L and 1R). Additionally, the nanobody system increased adhesion between human and pig cells, as demonstrated by the doublet and co-aggregation assays (FIGS. 3O-3Q).

[0145] To better replicate the conditions of a peri-implantation chimeric embryo, mEpiSCs and hiPSCs were co-cultured in Aggrewell™ 800 microwell plates, overlaying them with a 10% Matrigel extracellular matrix to promote cell polarization and the development of rosette and lumen structures within the cell aggregates (Bedzhov, Zernicka-Goetz, Cell (2014), 156:1032-1044). Rosettes typically appeared after 24 hours of culture, and lumens began to form after 48 hours. At this stage, the aggregates were fixed and stained with phalloidin to highlight the apical actin ring around the lumen surface. In these chimeric aggregates composed of both mEpiSCs and hiPSCs, analysis was performed on the extent of human cell polarization and contribution to lumen formation, defined by an elongated shape and direct contact with the central lumen. The findings revealed that Nano-GPI hiPSCs were significantly more effective at contributing to lumen formation than WT hiPSCs (FIGS. 1S-1U).

[0146] In-vivo testing of the nanobody based adhesion system

[0147] Building on the in vitro success of the membrane-localized nanobody adhesion system in enhancing adhesion between mouse and human PSCs, its impact in vivo was investigated to see if it would lead to increased human contribution to interspecies chimeras. Mice globally expressing GPI-anchored GFP were used (FIG. 4A), which had been previously established and characterized (Rhee et al., Genesis (2006), 44:202-218). Nano-GPI PSCs was employed for the in vivo experiments. First, it was assessed whether enforced cell adhesion had any adverse effects on embryo development, by generating intraspecies chimeras using donor Nano-GPI mESCs injected into GFP-GPI host blastocysts. It was found that the artificial cell adhesion did not disrupt development, as the chimeric embryos appeared grossly normal at mid-gestation and gave rise to live-born pups with visible coat color changes (FIGS. 2A-2B). Nano-GPI mESCs significantly contributed to E12.5 chimeric embryos and differentiated into cells expressing markers of all three germ layers (FIG. 4C). A summary of the results for the intraspecies and interspecies chimera experiments are shown in TABLES 1A-1B.

TABLE 1A
Summary of intraspecies and interspecies chimera experiments

| | Donor cell | Cell culture | Cells injected | Embryos injected |
|---|---|---|---|---|
| Donor cell line | species | media | per embryo | (E3.5) |
| hiPSC MyD88 KO + mKO (#4) | Human | 4CL | 10 | 77 |
| hiPSC MyD88 KO + mKO + Nano GPI (#4) | Human | 4CL | 10 | 144 |
| hiPSC + mKO + Nano GPI (#5) | Human | mTeSR1 | 10 | 51 |
| mESC B6-4 + mKO + Nano GPI (#1) | Mouse | NB2iL | 10 | 16 |
| mESC B6-4 + mKO + Nano GPI (#1) | Mouse | NB2IL | 10 | 63 |
| mESC B6-4 + mKO + Nano GPI (#3) | Mouse | NB2iL | 10 | 64 |
| mEpiSC A1 + mKO + Nano GPI (#3) | Mouse | NBFR | 10 | 25 |

TABLE 1B
Summary of intraspecies and interspecies chimera experiments (continuation of TABLE1A)

| | | mKO | Genomic | | % Positive |
|---|---|---|---|---|---|
| | | fluorescent | qPCR | % Positive | Embryos |
| | Embryos | postive | positive | Embryos | (Genomic |
| Donor cell line | recovered | embryos | embryos | (Fluorescence) | qPCR) |
| hiPSC MyD88 KO + mKO (#4) | 37 | 9 | 3 | 24.3% | 8.1% |
| hiPSC MyD88 KO + mKO + Nano GPI (#4) | 43 | 12 | 20 | 27.9% | 46.5% |
| hiPSC + mKO + Nano GPI (#5) | 22 | 10 | 9 | 45.5% | 40.9% |
| mESC B6-4 + mKO + Nano GPI (#1) | 5 | 4 | N/A | 80.0% | N/A |
| mESC B6-4 + mKO + Nano GPI (#1) | 29 | 18 | N/A | 62.1% | N/A |
| mESC B6-4 + mKO + Nano GPI (#3) | 12 | 7 | N/A | 58.3% | N/A |
| mEpiSC A1 + mKO + Nano GPI (#3) | 20 | 7 | N/A | 35.0% | N/A |

[0148] Interspecies chimeras were next generated using Nano-GPI hiPSCs as donor cells. These hiPSCs were cultured under two naïve-like conditions (LCDM18 and 4CL33 media) and genetically modified to knock out myeloid differentiation primary response 88 (MyD88), an innate immunity signaling adaptor protein whose loss reduces interspecies PSC competition. Similar to the intraspecies experiments, these Nano-GPI hiPSCs were injected into GFP-GPI mouse blastocysts, which were then transferred to surrogate mothers.

[0149] Next, interspecies chimeras were generated using control (not expressing nanobody) and Nano-GPI hiPSCs that lack MyD88 (to minimize cell competition) (Zheng et al., Nature (2021), 592:272-276). These hiPSCs were cultured in naïve 4CL medium (Mazid et al., Nature (2022), 605:315-324) to match the developmental stage of injected hiPSCs to the host blastocysts. These control and Nano-GPI hiPSCs were injected into GFP-GPI mouse blastocysts, which were then transferred to surrogate mothers and harvested at E8.5. Imaging of chimeric embryos using a fluorescent microscope revealed areas of red fluorescent signal from donor hiPSCs in some embryos (FIGS. 2D and 4D). To further quantify the human cell contribution in these embryos, mitochondrial genomic qPCR and immunohistochemistry (IHC) techniques were employed, with both targeting human-specific mitochondrial markers. The mitochondrial qPCR assay indicated that Nano-GPI hiPSCs contributed to E8.5 chimeric embryos at a significantly higher rate than control hiPSCs (FIGS. 2E-2G and TABLES 1A-1B). Notably, a higher percentage of embryos per embryo transfer derived from Nano-GPI hiPSCs surpassed the positive qPCR threshold (equivalent to 1 human cell in 10,000 mouse cells) compared to those derived from control hiPSCs (FIG. 2F). Additionally, chimeric embryos derived from Nano-GPI hiPSCs contained a higher average human DNA content per embryo than those from control hiPSCs (FIG. 2G). These findings were confirmed by repeating the qPCR assay with some of the embryos using a different primer (FIGS. 4E-4G). Furthermore, IHC staining of frozen sections from the chimeric embryos revealed that Nano-GPI hiPSCs could differentiate within the embryos and contribute to tissues derived from all three germ layers (FIG. 2H).

[0150] In addition to overcoming the interspecies adhesion barrier, it was investigated whether membrane-localized nanobody adhesion could address heterochrony, the mismatch in developmental stages between donor PSCs and the host embryo. Primed PSCs usually cannot contribute to chimera formation when injected into blastocysts without blocking cell apoptosis (Wang et al., Cell Res (2018), 28:126-129; Masaki et al., Cell Stem Cell (2016), 19:587-592) or cell competition (Zheng et al., Nature (2021), 592:272-276). Interestingly, a previous study found that overexpressing the adhesion protein E-cadherin enables mEpiSCs to contribute to blastocyst chimeras (Ohtsuka et al., PLOS One (2012), 7). This suggests that enhancing cell adhesion using our method might help overcome heterochrony as well. To test this, intraspecies chimera formation was first examined by injecting Nano-GPI mEpiSCs into GFP-GPI mouse blastocysts. Visible areas of red fluorescence were observed in 7 out of 20 recovered E8.5 embryos (FIG. 4H and TABLES 1A-1B). IHC on sections from these chimeric embryos showed that Nano-GPI mEpiSCs differentiated into cells expressing markers of all three embryonic germ layers (FIG. 4I). Nano-GPI hiPSCs cultured in a primed (mTeSR1) condition were injected into GFP-GPI mouse blastocysts. This also resulted in successful interspecies chimera formation at E8.5 (TABLES 1A-1B). These findings demonstrated that membrane-localized nanobody adhesion can help overcome heterochrony and enable chimeric contribution from primed PSCs in both intra- and inter-species contexts.

### Discussion

[0151] This study performed an in-depth analysis of the interspecies cell adhesion barrier by co-culturing PSCs from different species. A synthetic biology approach was developed, utilizing interactions between membrane-localized nanobodies and antigens to overcome this barrier. This approach significantly improved cell adhesion between mouse and human PSCs in vitro, as demonstrated by multiple adhesion assays. Importantly, the in vivo studies show that this synthetic cell adhesion system can also improve the chimeric contribution of human cells into mouse embryos. By attaching the nanobody and antigen to the cell's outer membrane using a GPI anchor, cell adhesion was enhanced in an orthogonal manner, which does not interfere with natural cell junctions or cellular signaling. This synthetic cell adhesion strategy enables interspecies organogenesis across a broader spectrum of species.

### Materials and Methods

[0152] All experiments followed the 2021 Guidelines for Stem Cell Research and Clinical Translation released by the International Society for Stem Cell Research (ISSCR). All human-mouse ex vivo and in vivo interspecies chimeric experimental studies were reviewed and approved by the University of Texas Southwestern Stem Cell Oversight Committee (SCRO).

Nanobody and GFP cell-surface constructs

[0153] The pOPINE vhhGFP4 anti-GFP nanobody plasmid (Addgene plasmid #49172; RRID: Addgene_49172) was gifted. The Nano-GPI construct was generated by fusing a membrane-targeting signal sequence to the N-terminus of the nanobody and a GPI anchor signal to the C-terminus via Gibson assembly. Membrane-targeted GFP constructs were generated using the same strategy. The plasmid containing the vhhGFP4 anti-GFP nanobody fused to the CD8 transmembrane sequence was gifted. Nano-GPI and Nano-CD8 sequences were cloned into a vector with expression driven by the CAG promoter and containing 5′ and 3′ inverted terminal repeat (ITR) sequences to allow for transposition and genomic integration when co-transfected with a Piggybac Transposase plasmid.

### Transgenic Mouse Lines

[0154] Mice with global expression of the GFP-GPI construct were purchased as a cryorecovery strain (#011106) from the Jackson Laboratory, and the colony was expanded by breeding heterozygotes to generate a homozygous transgenic strain.

### Cell Culture

[0155] Naïve mESCs derived from the C57BL/6 strain were maintained in the ground state of pluripotency by culture in 2i/LIF medium (Ying et al., Nature (2008), 453:519-523). Primed H9 hESCs, HFF-iPSCs, and mEpiSCs were maintained in NBFR medium (Wu et al., Nature (2015), 521:316-321), with the addition of 10 uM ROCKi (Tocris) during passaging and for 24 hours after each passage for the human cells. Primed mEPISCs and hPSCs cultured in NBFR medium were used for in vitro cell adhesion assays unless otherwise specified. For use in interspecies chimera experiments, hiPSCs were converted to the naïve state by culturing them in 4CL medium (first described by Mazid et al., Nature (2022), 605:315-324) containing the histone deacetylase (HDAC) inhibitor Trichostatin A and the H3K27 methyltransferase inhibitor DZNep for a minimum of three passages before injection into mouse blastocysts. During passaging, cultured cells were treated with TrypLE for 3 minutes at 37 C to detach them from the plate, then counted using a hemocytometer. Cells were transfected using the Lonza 4D Nucleofector in P3 primary cell solution in order to generate nanobody and GFP-expressing cell lines.

### Immunofluorescence Staining of Cell Junctions

[0156] Unlabeled mEpiSCs and mKO-labeled hiPSCs were plated at a 1:1 ratio for a total density of 100,000 cells per well on top of glass coverslips in 12 well gelatin-coated dishes with a feeder layer of mouse embryonic fibroblasts (MEFs). Cells were cultured in NBFR+10 uM ROCKi for 24 hours, followed by another 24 hours in NBFR without ROCK inhibitor. After 48 hours of co-culture, cells were fixed in 4% paraformaldehyde (PFA)/PBS for 30 minutes at room temperature (RT), then permeabilized in 0.1% Triton X-100 for 5 minutes at RT. Blocking was carried out in 5% donkey serum diluted in PBST (PBS+0.1% Tween-20) for 1 hour at RT. ZO1 and E-cadherin primary antibodies were diluted 1:200 each in blocking buffer (as described above) and incubated overnight at 4° C. After washing with PBST, samples were incubated with Alexa Fluor 488 conjugated secondary antibodies diluted in blocking buffer for 1 hr at RT, followed by nuclear staining with 1:3000 DAPI diluted in PBS at RT for 20 minutes. Coverslips were mounted onto slides in ProLong Gold Antifade Mountant, and slides were imaged on a LSM700 confocal microscope. Mouse and human cells were distinguished from one another by the presence of mKO red fluorescent protein in the human PSCs.

### Immunofluorescence Staining of Nanobody and Pluripotency Marker Expression

[0157] WT, Nano-GPI, and Nano-CD8 mESCs were plated at a density of 100,000 cells per well on glass coverslips in 12 well gelatin-coated plates with a MEF feeder layer. Cells were cultured in NB2iL medium for 48 hours, then fixed in 4% PFA for 30 minutes at RT and permeabilized in 0.1% Triton X-100 for 5 minutes (nanobody) or 15 minutes (OCT4/SOX2). Blocking was carried out in 5% goat serum (nanobody staining) or donkey serum (OCT4/SOX2 staining) diluted in PBST (PBS+0.1% Tween-20) for 1 hour at RT. OCT4 and SOX2 primary antibodies were diluted 1:200 each in blocking buffer and incubated overnight at 4° C. For nanobody staining, the primary antibody was omitted, and cells were incubated directly with Alexa Fluor 647 conjugated goat anti-alpaca secondary antibody diluted 1:100 in blocking buffer at 4° C. overnight. After washing with PBST, OCT4/SOX2 staining samples were incubated with Alexa Fluor 488 conjugated secondary antibodies diluted in blocking buffer for 1 hr at RT. All samples were washed with PBST, then counterstained with 1:3000 DAPI diluted in PBS at RT for 20 minutes. Coverslips were mounted onto slides in ProLong Gold Antifade Mountant, and slides were imaged on a LSM700 confocal microscope.

### Correlative Light-Electron Microscopy

[0158] GFP-GPI mEpiSCs and mKO-labeled WT or Nano-GPI hiPSCs were plated in a 1:1 ratio at low density and co-cultured in a 35 mm gridded MatTek glass bottom dish. After 48 hours, cells were fixed in 4% PFA/7.5% sucrose, then imaged via fluorescent microscopy to establish locations of mouse and human cells within the grid. Mouse and human cells were distinguished by red fluorescent labeling of human PSCs and green fluorescent labeling of mouse PSCs. Cells were then post-fixed in 1% glutaraldehyde and washed in 50 mM glycine, then submitted to the University of Texas Southwestern Electron Microscopy core facility for processing and contrast enhancement. Cells were imaged via transmission electron microscopy (TEM) at magnifications between 1000× and 10,000×. Locations of human and mouse cells within mixed colonies were determined by comparing cell shape and location on electron microscopy images with the fluorescence microscopy images previously taken at lower magnification. TEM images were labeled, colorized, and analyzed in FIJI.

### GFP Binding Assay

[0159] The ability of Nano-GPI and Nano-CD8 PSCs to bind GFP was measured by adding 5 μg of purified GFP protein to the cell culture media. After 1 hour of culture in GFP-containing medium, cells were imaged using a fluorescence microscope. All nanobody-expressing cell lines demonstrated the ability to capture free-floating GFP and display it on their cell membranes.

### Flow Cytometry Doublet Assay

[0160] Differentially labeled primed PSCs (mEpiSCs expressing GFP-GPI and hPSCs/mEpiSCs labeled with monomeric Kusabira Orange (mKO)) were combined at a ratio of 1:1 for a total of 400,000 cells per well. This cell mixture was plated in a 24-well low-adhesion dish (Corning) and agitated at 80 rpm on an orbital shaker at 37° C. for 1 hour. The cells were filtered through a 70 μm cell strainer to break up large clusters and analyzed using a BD LSRII flow cytometer. An expanded live cell gate was used to capture doublets, and only the resulting doublets were analyzed for GFP and mKO fluorescence using FlowJo software. In human+pig doublet assays, cells were cultured in a chemically defined medium first described by Choi et al (Choi et al., Stem Cell Reports (2019), 13:221-234). In human+monkey doublet assays, cells were cultured in mTESR1. For human+mouse and human+rat doublet assays, cells were cultured in NBFR medium in the primed state of pluripotency unless otherwise specified. In addition to primed cells, the doublet assay was also performed on cells cultured in the naïve 4CL condition and after one week of random differentiation in serum-containing medium (FIG. 1F).

### 3D Co-Aggregation Assay

[0161] Red and green fluorescently labeled primed PSCs were combined at a ratio of 1:1 for a total of 15,000 cells per sample. The cell mixtures were plated in an Aggrewell 800 plate, resulting in an average aggregate size of 50 total cells per microwell. Aggregates were imaged after 24 hours of culture. For human+mouse co-aggregation studies, aggregates were cultured in NBFR medium. In human+pig co-aggregation studies, aggregates were cultured in a chemically defined medium first described by Choi et al (Choi et al., Stem Cell Reports (2019), 13:221-234). In human+monkey co-aggregation studies, aggregates were cultured in mTESR1. After 24 hours of culture, aggregates were imaged, and each aggregate was scored according to whether it was predominantly intermixed or predominantly segregated (showing a clear line of demarcation between two differently colored cell clusters, with fewer than three cells crossing this midline). Percentages of intermixed aggregates were compared between samples using Student's t-test (between pairs of species) or one-way ANOVA (between more than two samples, such as in FIG. 1P).

### Wash Assay

[0162] Ibidi 2-well cell culture inserts were placed in each well of an Ibidi 8-well chamber plate, then coated with a solution of 0.5% Matrigel for one hour at 37° C. 100,000 red fluorescently labeled mEpiSCs, hESCs, or hiPSCs were seeded per side of each culture insert in NBFR medium+ROCKi and allowed to attach to the plate overnight. On the following day, the culture insert was removed and 100,000 GFP-GPI mEpiSCs were seeded per well. After 30 minutes, the cell suspension was removed and each well was washed with PBS three times to remove any unattached cells, followed by fixation in 4% PFA for 20 minutes. Samples were imaged using a Zeiss LSM880 confocal microscope and the number of remaining attached green cells per culture insert was quantified in FIJI.

### Lumen Formation Assay

[0163] Red and green fluorescently labeled PSCs were combined at a ratio of 1:1 for a total of 3000 cells per sample. This dilute cell mixture was plated in an Aggrewell 800 plate, resulting in an average aggregate size of 10 total cells per microwell. After 4 hours, the medium (NBFR+ROCKi) was carefully replaced with fresh medium containing 10% Matrigel. Aggregates were cultured for 48 hours in this ECM overlay, which was sufficient for cells to polarize and begin to form lumens. After 48 hours, aggregates were harvested, fixed for 30 minutes in 4% PFA, and permeabilized for 15 minutes with 0.1% Triton X-100. Aggregates were stained with Alexa Fluor 647-conjugated phalloidin dye recognizing the actin protein, and counterstained with DAPI. Aggregates were imaged on the LSM880 confocal microscope. Most aggregates were composed of a mixture of mouse and human cells, and only these chimeric aggregates were considered. Chimeric aggregates were scored according to both the number of human cells they contained and the percentage of these human cells in direct contact with the phalloidin-stained lumen. Percentages of polarized human cells in contact with the lumen were compared between WT-hiPSC and Nano-GPI hiPSC aggregates using Student's t-test.

### Random Differentiation

[0164] Mouse and human primed PSCs were plated at a density of 100,000 cells per well onto a 6-well cell culture plate coated with Matrigel in N2B27 basal medium containing 10% FBS. Cells were allowed to randomly differentiate in this serum-containing medium for one week with media changes every other day, then dissociated and used for doublet flow cytometry assays.

### Teratoma Formation

[0165] Nano-GPI and Nano-CD8 mESCs at a concentration of 10,000,000 cells/mL suspended in 50% Matrigel and 50% NB2iL culture medium were injected subcutaneously into the flanks of NOD/SCID immunodeficient mice. Three NOD/SCID mice were used, each with one flank receiving Nano-GPI mESCs and the other receiving Nano-CD8 mESCs. 1 million cells were injected per tumor, and this strategy generated three tumors per cell type. Mice were monitored for tumor growth and sacrificed four weeks after cell injection. Tumors were dissected and fixed in 4% PFA for 48 hours, then submitted to the UT Southwestern Histology Core facility for paraffin embedding, sectioning, and H&E staining.

### Intraspecies Chimera Studies

[0166] Female GFP-GPI mice were superovulated via injection of PMSG and hCG, then mated with male GFP-GPI mice. Blastocysts were harvested at E3.5 and microinjected with either 10 naïve Nano-GPI mESCs (derived from the C57BL/6 strain) or 10 primed Nano-GPI mEpiSCs (for heterochrony studies) each, then transferred to pseudopregnant CD-1 surrogate females and allowed to develop until E8.5 (mEpiSCs for heterochrony), E12.5 (naïve mESCs), or until the surrogates gave birth naturally at E19.5 (naïve mESCs). E8.5 and E12.5 embryos were dissected and imaged using a fluorescence stereomicroscope, then fixed in 4% PFA/0.1% PVA/PBS overnight at 4° C. Embryos were permeabilized in 30% sucrose for 24 hours, then embedded into tissue blocks in OCT compound and frozen until sectioning. 12 m tissue sections were cut using a Leica cryostat and mounted onto gelatin-coated slides, which were then analyzed via immunohistochemistry. Live-born pups were imaged for coat color change indicating chimerism at one week of age.

### Interspecies Chimera Studies

[0167] Female GFP-GPI mice were superovulated via injection of PMSG and hCG, then mated with male GFP-GPI mice. Blastocysts were harvested at E3.5 and microinjected with either 10 control or Nano-GPI hiPSCs each, then transferred to pseudopregnant CD-1 surrogate mothers and allowed to develop until E8.5. E8.5 embryos were dissected and imaged using a fluorescence stereomicroscope, then fixed in 4% PFA/0.1% PVA/PBS overnight at 4° C. Embryos were permeabilized in 30% sucrose for 24 hours, then embedded into tissue blocks in OCT compound and frozen until sectioning. 12 μm sections were cut using a Leica cryostat, and alternating sections were mounted onto slides or reserved for DNA extraction. Genomic DNA was extracted from tissue sections using the Qiagen DNeasy kit and used for mitochondrial genomic qPCR. Slides containing tissue sections were analyzed via immunohistochemistry.

Mitochondrial Genomic Quantitative PCR (qPCR)

[0168] Genomic DNA was isolated from interspecies teratomas and interspecies chimeric embryos, as well as known ratios of mixed mouse and human cultured PSCs. DNA was isolated using the Qiagen DNasy Blood and Tissue Kit, then diluted to a concentration of 5 ng/μL for a final amount of 10 ng of DNA per reaction. qPCR reactions were set up using the SYBR Green 2× Mastermix using primers targeting human-specific sequences in the mitochondrial genome (see TABLE 2).

TABLE 2
Primer sequences used for mitochondrial genomic qPCR

| Primer Name | Target | Sequence | SEQ ID NO |
|---|---|---|---|
| Human Mito 1 F | DNA encoding Human | AATATTAAACACAAACTACCACCTA | 114 |
| | Mitochondrial ATP Synthase | CCT | |
| | Subunit 8 | | |
| Human Mito 1 R | DNA encoding Human | TGGTTCTCAGGGTTTGTTATAA | 115 |
| | Mitochondrial ATP Synthase | | |
| | Subunit 8 | | |
| Human Mito 2 F | Human Mitochondrial | CGGGAGCTCTCCATGCATTT | 116 |
| | Genomic DNA | | |
| Human Mito 2 R | Human Mitochondrial | GACAGATACTGCGACATAGGGT | 117 |
| | Genomic DNA | | |
| Common Mito 1 F | DNA encoding | GCTAAGACCCAAACTGGGATT | 118 |
| | Human/Mouse Mitochondrial | | |
| | 12s rRNA | | |
| Common Mito 1 R | DNA encoding | GGTTTGCTGAAGATGGCGGTA | 119 |
| | Human/Mouse Mitochondrial | | |
| | 12s rRNA | | |

[0169] qPCR was performed on the Bio-Rad CFX384 thermocycler for a total of 40 cycles, then analyzed using the CFX Manager software and Microsoft Excel, as well as GraphPad Prism for statistics and visualization. Three technical replicates were used per sample, and CT values were normalized to those of a common sequence that is identical between human and mouse mitochondrial genomes. 2-delta-CT values were calculated and compared to the 2DCTs of known mouse-human cell mixtures. These known mixtures served as a standard curve of human DNA percentage, and a linear regression equation was used to calculate the percentage of human DNA in chimeric embryos.

### Immunohistochemistry (Frozen Tissue)

[0170] Frozen sections from chimeric embryos were mounted onto gelatin-coated slides and stained via the following IHC protocol: Tissue sections were washed in PBS, then permeabilized in 0.3% Triton X-100/PBS. Antigen retrieval was performed by incubation in 10 mM citrate buffer (pH 6.0) at 90° C. for 10 minutes. Samples were blocked in blocking buffer containing 5% donkey or goat serum (depending on the host species of secondary antibodies in each experiment) and 0.3% Triton X-100 in PBS for 1 hour at room temperature, then incubated overnight at 4° C. with primary antibodies diluted in blocking buffer. All primary antibodies were diluted 1:200 aside from the human mitochondrial antibody, which was diluted 1:800. Fluorescently conjugated donkey or goat secondary antibodies diluted 1:200 in blocking buffer were applied for 1 hour at RT, then samples were counterstained with 1:10,000 DAPI for 15 minutes. Autofluorescence was quenched using TrueBlack Lipofuscin (Cell Signaling Technologies), and coverslips were mounted onto slides in ProLong Gold Antifade Mountant (Invitrogen). Slides were imaged on the LSM700 confocal microscope.

TABLE 3
List of materials and resources

| Reagent or Resource | Source | Identifier |
|---|---|---|
| Antibodies | | |
| GFP antibody, Goat polyclonal | Rockland | Catalog #: 600-101-215, |
| | | RRID: AB_218182 |
| GFP antibody, Rabbit polyclonal | Rockland | Catalog #: 600-401-215, |
| | | RRID: AB_828167 |
| Anti-monomeric Kusabira- | MBL International | Catalog #: M168-3M |
| Orange 2 mAb (Monoclonal | Corporation | RRID: AB_10597268 |
| Antibody) | | |
| Anti-Mitochondria antibody | Abcam | Catalog #: ab92824, |
| [113-1] | | RRID: AB_10562769 |
| PAX6 Polyclonal antibody | Invitrogen | Catalog # 42-6600, |
| | | RRID: AB_2533534 |
| Alpha-Smooth Muscle Actin | Invitrogen | Catalog # MA1-06110, |
| Monoclonal Antibody (1A4) | | RRID: AB_557419 |
| Recombinant Anti-GATA4 | Abcam | Catalog #: ab134057 |
| antibody [EPR23691-12] | | RRID: AB_2725747 |
| Foxa2/hnf3β (D56D6) XP ® | Cell Signaling Technology | Catalog # 8186S |
| Rabbit mAb | | RRID: AB_10891055 |
| Oct3/4 Antibody (C-10) | Santa Cruz Biotechnology | Catalog #: sc-5279, |
| | | RRID: AB_628051 |
| Sox-2 (E-4) antibody | Santa Cruz Biotechnology | Catalog #: sc-365823, |
| | | RRID: AB_10842165 |
| ZO-1 Monoclonal antibody | Invitrogen | Catalog # 33-9100, |
| | | RRID: AB_87181 |
| E-Cadherin (24E10) Rabbit mAb | Cell Signaling Technology | Catalog #: 3195, |
| | | RRID: AB_2291471 |
| Donkey anti-goat IgG (H + L) | Invitrogen | Catalog # A-11055, |
| Antibody, Alexa Fluor ™ 488 | | RRID: AB_2534102 |
| Donkey anti-rabbit IgG (H + L) | Invitrogen | Catalog # A-21206, |
| Antibody, Alexa Fluor ™ 488 | | RRID: AB_2535792 |
| Donkey anti-mouse IgG (H + L) | Invitrogen | Catalog # A-31570, |
| Antibody, Alexa Fluor ™ 555 | | RRID: AB_2536180 |
| Donkey anti-rabbit IgG (H + L) | Invitrogen | Catalog # A-31572, |
| Antibody, Alexa Fluor ™ 555 | | RRID: AB_162543 |
| Donkey anti-mouse IgG (H + L) | Invitrogen | Catalog # A-31571, |
| Antibody, Alexa Fluor ™ 647 | | RRID: AB_162542 |
| Donkey anti-rabbit IgG (H + L) | Invitrogen | Catalog # A-31573, |
| Antibody, Alexa Fluor ™ 647 | | RRID: AB_2536183 |
| Goat anti-Mouse IgG (H + L) | Invitrogen | Catalog # 31430, |
| Secondary Antibody, HRP | | RRID: AB_228307 |
| Goat Anti-Mouse IgG H&L | Abcam | Catalog #: ab39619, |
| (10 nm gold) | | RRID: AB_954440 |
| Goat anti-Mouse IgG1 Cross- | Invitrogen | Catalog #: .A21127, |
| Adsorbed Secondary Antibody, | | RRID: AB_2535769 |
| Alexa Fluor ™ 555 | | |
| Goat anti-Mouse IgG2a Cross- | Invitrogen | Catalog #: .A21241, |
| Adsorbed Secondary Antibody, | | RRID: AB_2535810 |
| Alexa Fluor ™ 647 | | |
| Goat anti-Rabbit IgG (H + L) | Invitrogen | Catalog # A-11008, |
| Cross-Adsorbed Secondary | | RRID: AB_143165 |
| Antibody, Alexa Fluor ™ 488 | | |
| Alexa Fluor ® 647 AffiniPure ™ | Jackson ImmunoResearch | Catalog # 128-605-160 |
| Goat Anti-Alpaca IgG (H + L) | | RRID: AB_2783782 |
| Chemicals, Peptides, | | |
| Recombinant Proteins | | |
| Alexa Fluor ® 647 Phalloidin | Invitrogen | Catalog #: A22287 |
| Recombinant Human FGF-basic | Peprotech | Catalog # 100-18B |
| Endo-IWR 1 | Tocris | Catalog # 3532 |
| Recombinant human LIF | Peprotech | Catalog # 300-05 |
| CHIR99021 | Selleckchem | Catalog # S1263 |
| PD0325901 | Selleckchem | Catalog # S1036 |
| Geltrex ™ LDEV-Free Reduced | Gibco | Catalog # A1413201 |
| Growth Factor Basement | | |
| Membrane Matrix | | |
| Corning ® Matrigel ® hESC- | Corning | Catalog # 354277 |
| Qualified Matrix, LDEV-free | | |
| N2 supplement (100X) | Gibco | Catalog # 17502-048 |
| B27 supplement (50X) | Gibco | Catalog # 17504-044 |
| Recombinant Human/Murine/Rat | Peprotech | Catalog # 120-14E |
| Activin A | | |
| mTeSR ™ Plus | STEMCELL Technologies | Catalog # 100-1130 |
| WH-4-023 | Tocris | Catalog #. 5413 |
| DMEM/F12 | Gibco | Catalog # 11320-033 |
| Advanced DMEM/F12 | Gibco | Catalog #: 12634010 |
| GlutaMAX (100X) | Gibco | Catalog # 35050-061 |
| MEM Non-Essential Amino | Gibco | Catalog # 11140-050 |
| Acids (100X) | | |
| Sodium Pyruvate | Sigma Aldrich | Catalog # S8636-100ML |
| 2-Mercaptoethanol (1000X) | Gibco | Catalog # 21985-023 |
| Fetal Bovine Serum | Sigma | Catalog # 1270548 |
| XAV-939 | Tocris | Catalog # 3748 |
| L-Ascorbic acid 2-phosphate | Sigma-Aldrich | Catalog # A8960 |
| Trichostatin A | Sigma-Aldrich | Catalog # V900931 |
| DZNep | Selleck Chemicals | Catalog # S7120 |
| OptiMEM Reduced Serum | Thermo Fisher Scientific | Catalog # 31985088 |
| Medium | | |
| Trichostatin A | Neta Scientific | Catalog # AST-43193 |
| 3-deazaneplanocin A (DZNeP) | Selleck Chemicals | Catalog # S7120 |
| Green Fluorescent Protein | Millipore | Catalog #14-392 |
| DAPI | Thermo Fisher Scientific | Catalog # D3571 |
| DNase I | Thermo Fisher Scientific | Catalog # 18047019 |
| 2x SYBR Green Mastermix | APExBIO | Catalog # K1070 |
| Y-27632 | APExBIO | Catalog # A3008 |
| KnockOut Serum Replacement | Gibco | Catalog # 10828028 |
| Gelatin | Sigma | Catalog # G1850-500g |
| Donkey serum | Sigma | Catalog # D9663 |
| Goat serum | Sigma | Catalog # G9023 |
| Bovine serum albumin | Sigma | Catalog t# A6003 |
| Paraformaldehyde 16% Aqueous | Electron Microscopy | Catalog # 15710 |
| Solution EM Grade | Sciences | |
| Triton X-100 | Sigma | Catalog # T8787 |
| Tween 20 | Sigma | Catalog # P9416 |
| RIPA buffer | Sigma | Catalog # R0278 |
| Protease and phosphatase | Sigma | Catalog # PPC1010 |
| inhibitor | | |
| TrueBlack ® Lipofuscin | Biotium | Catalog # 23007 |
| Autofluorescence Quencher | | |
| ProLong ™ Gold Antifade | Invitrogen | Catalog # P36934 |
| Mountant | | |
| Anti-Adherence Rinsing Solution | STEMCELL Technologies | Catalog #. 07,010 |
| TrypLE ™ Express | Gibco | Catalog # 12605036 |
| NuPAGE ™ LDS Sample Buffer | Invitrogen | Catalog # NP0008 |
| (4X) | | |
| Card HyperOva PMSG | Cosmo Bio | Catalog # KyD-010-EX-X5 |
| hCG Protein | ProSpec | Catalog # HOR-250 |
| Software and algorithms | | |
| Illustrator | Adobe | Adobe Illustrator 2022 |
| Excel | Microsoft | Microsoft Excel V16.0 |
| FIJI | Schindelin et al., 2012 | N/A |
| GraphPad Prism | Dotmatics | GraphPad Prism 10.1.2 |
| FlowJo | BD (Becton, Dickinson & | See FlowJo website |
| | Company) | |
| CFX Manager | Bio-Rad | N/A |
| BioRender | BioRender | See BioRender website |
| EndNote | Microsoft | EndNote 20 |
| Other | | |
| AggreWell 800 | STEMCELL Technologies | Catalog # 34815 |
| BD LSR II Flow cytometer | BD Biosciences | N/A |
| Zeiss LSM700 confocal | Zeiss | N/A |
| microscope | | |
| Zeiss LSM880 confocal | Zeiss | N/A |
| microscope | | |
| ECHO Revolve microscope | Echo | N/A |
| Stereo Microscope SMZ800N | Nikon | Catalog # SMZ800N |
| CFX384 Touch Real-Time PCR | Bio-Rad | Catalog # 1855484 |
| Detection System | | |
| μ-Slide 8-well chamber slide | Ibidi | Catalog # 80821 |
| Costar ® 24-well Clear Flat | Corning | Catalog # 3473 |
| Bottom Ultra-Low Attachment | | |
| Multiple Well Plates | | |
| 4D Nucleofector X Unit | Lonza | Catalog # AAF-1003X |
| P3 Primary Cell 4D- | Lonza | Catalog # V4XP-3024 |
| Nucleofector ® X Kit L | | |
| Dneasy Blood & Tissue Kit | Qiagen | Catalog # 69504 |
| PureLink ™ HiPure Plasmid | Invitrogen | Catalog #K210002 |
| Miniprep Kit | | |
| 25 Culture-Inserts 2 Well | Ibidi | Catalog # 80209 |

### Example 2: Improvements to Cellular Adhesion

[0171] In an effort to improve cell adhesion, optimization of the cell adhesion proteins was performed. Notably, the Nano-GPI constructs prepared in Example 1 contained a membrane-targeting signal sequence and GPI anchor signal, which localize the cell-adhesion nanobodies at the cell membrane. It was recognized that during cell adhesion, this peripheral positioning has the potential to instigate instability of adhesion and potentially tear the cells apart. To enhance the stability of cell adhesion, it was hypothesized that implementing a means for integrally anchoring the nanobodies or EGFP could solve this problem. Accordingly, the nanobodies and/or EGFP were fused with the cytoskeletal protein intercellular adhesion molecule 1 (ICAM1). With this solution, integration with the cytoskeleton improves the stability of cellular adhesion. To achieve this, plasmids having ICAM1 cell membrane anchor proteins were designed, according to TABLE 4 below.

TABLE 4
Adhesion constructs comprising ICAM1
cell membrane anchor proteins

| Construct | |
|---|---|
| Description | Design |
| nanobody-ICAM1 | PiggyBac (PB)_TRE3G |
| | Promoter_GFP_Nano_hICAM1_HA_EF1a |
| | Promoter_Tet-on 3G_PuroR_AmpR |
| EGFP-ICAM1 | PB_CAG Promoter_EGFP_hICAM1_AmpR |

[0172] To verify whether the nanobody fused to the cytoskeleton can efficiently bind EGFP, wash assay experiments were performed according to protocols described in Example 1. Plasmids expressing GFP nanobody or GFP were incorporated into the mESCs genome using the PiggyBac transposon system, resulting in the mESCs GFP nanobody and mESCs GFP cell lines, respectively (FIG. 5A). 100,000 mESCs expressing GFP nanobody were seeded on each side of the culture insert in NBFR medium and allowed to attach overnight. The next day, the culture insert was removed, and mESCs expressing GFP were seeded in each well. After 30 minutes, the cell suspension was aspirated, and each well was washed three times with PBS to remove any unattached cells. The samples were imaged using a Zeiss LSM880 confocal microscope. The results show that compared to mESCs, which do not express the GFP nanobody, mESCs expressing GFP nanobody can efficiently bind to mESCs expressing GFP (FIG. 5B). These results demonstrate that cell adhesion proteins bound to the cytoskeleton can efficiently facilitate cell binding.

[0173] Additionally, to ensure that cells specifically adhere to embryonic tissues rather than extra-embryonic tissues, plasmids were designed having EGFP expression driven by the Primed Oct4 promoter (see TABLE 5). This approached ensures that only epiblast cells, which form the embryo, express EGFP, allowing cells expressing nanobody to adhere exclusively to these tissues.

TABLE 5
Epiblast-directed construct

| Construct type | Design |
|---|---|
| Oct4-EGFP-ICAM1 | PB_Primed Oct4 |
| | Promoter_EGFP_hICAM1_AmpR |

[0174] To test the efficiency of these adhesion proteins in vivo, the EGFP-ICAM1 and Oct4-EGFP-ICAM1 plasmids, of TABLES 4 and 5, respectively, were injected along with PBase mRNA into mouse zygotes, generating mice expressing the plasmids

[0175] To test which binding strength is more favorable for cell-cell adhesion during embryonic development, nanobodies with varying strengths of GFP binding were incorporated into construct designs, as shown in TABLE 6.

TABLE 6
Epiblast-directed constructs comprising LAG nanobodies

| Construct type | Design |
|---|---|
| LAG5-ICAM1 | PB_TRE3G Promoter_Nano LAG5 (Kd = 14,200 nM)_hICAM1_HA_EF1a |
| | Promoter_Tet-on 3G_PuroR_AmpR |
| LAG6-ICAM1 | PB_TRE3G Promoter_Nano LAG6 (Kd = 310 nM)_hICAM1_HA_EF1a |
| | Promoter_Tet-on 3G_PuroR_AmpR |
| LAG8-ICAM1 | PB_TRE3G Promoter_Nano LAG8 (Kd = 20,000 nM)_hICAM1_HA_EF1a |
| | Promoter_Tet-on 3G_PuroR_AmpR |
| LAG10-ICAM1 | PB_TRE3G Promoter_Nano LAG10(Kd = 97 nM)_hICAM1_HA_EF1a |
| | Promoter_Tet-on 3G_PuroR_AmpR |
| LAG11-ICAM1 | PB_TRE3G Promoter_Nano LAG11(Kd = 22,900 nM)_hICAM1_HA_EF1a |
| | Promoter_Tet-on 3G_PuroR_AmpR |
| LAG17-ICAM1 | PB_TRE3G Promoter_Nano LAG17 (Kd = 50 nM)_hICAM1_HA_EF1a |
| | Promoter_Tet-on 3G_PuroR_AmpR |
| LAG18-ICAM1 | PB_TRE3G Promoter_Nano LAG18 (Kd = 3,800 nM)_hICAM1_HA_EF1a |
| | Promoter_Tet-on 3G_PuroR_AmpR |
| LAG27-ICAM1 | PB_TRE3G Promoter_Nano LAG27(Kd = 9.5 nM)_hICAM1_HA_EF1a |
| | Promoter_Tet-on 3G_PuroR_AmpR |
| LAG29-ICAM1 | PB_TRE3G Promoter_Nano LAG29 (Kd = 110 nM)_hICAM1_HA_EF1a |
| | Promoter_Tet-on 3G_PuroR_AmpR |
| LAG30-ICAM1 | PB_TRE3G Promoter_Nano LAG30 (Kd = 0.5 nM)_hICAM1_HA_EF1a |
| | Promoter_Tet-on 3G_PuroR_AmpR |
| LAG42-ICAM1 | PB_TRE3G Promoter_Nano LAG42 (Kd = 600 nM)_hICAM1_HA_EF1a |
| | Promoter_Tet-on 3G_PuroR_AmpR |

[0176] To verify whether the adhesion strategy could enhance the contribution of hPSCs to mouse embryos, nanobody plasmids with different binding affinities (i.e., the LAG5-ICAM1, LAG11-ICAM1, LAG18-ICAM1, and LAG42-ICAM1 constructs of TABLE 6) were incorporated into the hPSCs genome using the PiggyBac transposon system, generating the hPSCs.

The application's sequence listing, which the Patent Office published only in electronic form, follows.

SEQUENCE LISTING (119 sequences)

SEQ ID NO: 1 - protein, 24 aa, synthetic construct
MVEMLPTVAVLVLAVSVVAKDNTT

SEQ ID NO: 2 - protein, 27 aa, synthetic construct
MASPLTRFLSLNLLLLGESIILGSGEA

SEQ ID NO: 3 - protein, 20 aa, synthetic construct
MNLQPIFWIGLISSVCCVFA

SEQ ID NO: 4 - protein, 21 aa, synthetic construct
MASTGLQILGIVLTLLGWVNA

SEQ ID NO: 5 - protein, 8 aa, synthetic construct
LQEFATMQ

SEQ ID NO: 6 - protein, 4 aa, synthetic construct
QLEN

SEQ ID NO: 7 - protein, 19 aa, synthetic construct
LVSCALPMWMWKVTAFIGN

SEQ ID NO: 8 - protein, 31 aa, synthetic construct
GGISLLVQNTSWMLLLLLSLSLLQALDFISL

SEQ ID NO: 9 - protein, 193 aa, synthetic construct
KPQAPELRIFPKKMDAELGQKVDLVCEVLGSVSQGCSWLFQNSSSKLPQPTFVVYMASSHNKITWDEKLNSSKLFSAMRDTNNKYVLTLNKFSKENEGYYFCSVISNSVMYFSSVVPVLQKVNSTTTKPVLRTPSPVHPTGTSQPQRPEDCRPRGSVKGTGLDFACDIYIWAPLAGICVALLLSLIITLICYH

SEQ ID NO: 10 - protein, 52 aa, synthetic construct
IVIITVVAAAVIMGTAGLSTYLYNRQRKIKKYRLQQAQKGTPMKPNTQATPP

SEQ ID NO: 11 - protein, 81 aa, synthetic construct
VENPECPTGPDIIPIVAGVVAGIVLIGLALLLIWKLLMIIHDRREFAKFEKEKMNAKWDTGENPIYKSAVTTVVNPKYEGK

SEQ ID NO: 12 - protein, 174 aa, synthetic construct
SILGILGGILALLILILLLLLFLRRRAVVKEPLLPPEDDTRDNVYYYDEEGGGEEDQDFDLSQLHRGLDARPEVTRNDVAPTLMSVPRYLPRPANPDEIGNFIDENLKAADTDPTAPPYDSLLVFDYEGSGSEAASLSSLNSSESDKDQDYDYLNEWGNRFKKLADMYGGGEDD

SEQ ID NO: 13 - protein, 148 aa, synthetic construct
ALPQDLQAARALCVVTLLIVLLGLLVYLAGAKCTTCVEDRNSKSRLVLISGIIFVISGVLTLIPVCWTAHSIIQDFYNPLVADAQKRELGASLYLGWAASGLLLLGGGLLCCACSSGGTQGPRHYMACYSTSVPHSRGPSEYPTKNYV

SEQ ID NO: 14 - protein, 255 aa, synthetic construct
MASKGEELFTGVVPILVELDGDVNGHKFSVSGEGEGDATYGKLTLKFICTTGKLPVPWPTLVTTFGYGVQCFARYPDHMKQHDFFKSAMPEGYVQERTIFFKDDGNYKTRAEVKFEGDTLVNRIELKGIDFKEDGNILGHKLEYNYNSHNVYIMADKQKNGIKVNFKIRHNIEDGSVHLADHYQQNTPIGDGPVLLPDNHYLSTQSALSKDPNEKRDHMVLLEFVTAAGITHGMDELYKGLEVLFQGPSHHHHHH

SEQ ID NO: 15 - protein, 237 aa, synthetic construct
MSKGEELFTGVVPILVELDGDVNGHKFSVSGEGEGDATYGKLTLKFICTTGKLPVPWPTLVTTFSYGVQCFSRYPDHMKRHDFFKSAMPEGYVQERTISFKDDGNYKTRAEVKFEGDTLVNRIELKGIDFKEDGNILGHKLEYNYNSHNVYITADKQKNGIKANFKIRHNIEDGSVQLADHYQQNTPIGDGPVLLPDNHYLSTQSALSKDPNEKRDHMVLLEFVTAAGILEHHHHHH

SEQ ID NO: 16 - protein, 237 aa, synthetic construct
MSKGEELFTGVVPILVELDGDVNGHKFSVSGEGEGDATYGKLTLKFICTTGKLPVPWPTLVTTFSYGVQCFSRYPDHMKRHDFFKSAMPEGYVQERTISFKDDGNYKTRAEVKFEGDTLVNRIELKGIDFKEDGNILGHKLEYNYNSHNVYITADKQKNGIKANFKIRHNIEDGSVQLADHYQQNTPIGDGPVLLPDNHYLSTQSKLSKDPNEKRDHMVLLEFVTAAGILEHHHHHH

SEQ ID NO: 17 - protein, 114 aa, synthetic construct
VQLVESGGALVQPGGSLRLSCAASGFPVNRYSMRWYRQAPGKEREWVAGMSSAGDRSSYEDSVKGRFTISRDDARNTVYLQMNSLKPEDTAVYYCNVNVGFEYWGQGTQVTVSS

SEQ ID NO: 18 - protein, 127 aa, synthetic construct
MAQVQLVESGGGLVQAGGSLRLSCAASGRTFSNYAMGWFRQAPGKEREFVAAISWTGVSTYYADSVKGRFTISRDNDKNTVYVQMNSLIPEDTAIYYCAAVRARSFSDTYSRVNEYDYWGQGTQVTV

SEQ ID NO: 19 - protein, 124 aa, synthetic construct
MAQVQLVESGGGLVQAGGSLRVSCAASGRTYSDYAMGWFRQAPGKERDFVAGISGSGGDTYYADSVKGRFTISRDNAKNTMYLQMNSLKPEDTAVYFCAARTGTVLFTSRVDYRYWGQGTQVTV

SEQ ID NO: 20 - protein, 123 aa, synthetic construct
QVQLVESGGGLVQAGGSLRLSCAASGSIFSSNAMAWYRQTPEKQRELICDITRGGITKCADSVKGRFTISRDNTKNTVYLQMNSLKSEDTAVYYCAAKSEGYFGFPRVENEYPYWGQGTQVTV

SEQ ID NO: 21 - protein, 126 aa, synthetic construct
MAQVQLVESGGGLVQAGGSLRLSCAASGRTFSTSAMAWFRQAPGKEREFAAGITWISSSTYYTDSVKGRFTISRDNAKNTVYLQMNSLKPEDTAVYYCAAKSEGYFGFPRVENEYPYWGQGTQVTV

SEQ ID NO: 22 - protein, 124 aa, synthetic construct
MAQVQLVESGGGLVQHGGSLRLSCVTSGFTFDIHDMGWFRQAPGKERDIVARISKSGDITYYADSVKGRFIISRDNTKNTVYLQMNSLKPEDTAVYYCAATLRATITSFDEYVYRGQGTQVTVS

SEQ ID NO: 23 - protein, 127 aa, synthetic construct
MADVQLVESGGGLVQAGGSLRLSCAASGRTFSTSAMGWFRQAPGKEREFVARITWSAGYTAYSDSVKGRFTISRDKAKNTVYLQMNSLKPEDTAVYYCASRSAGYSSSLTRREDYAYWGQGTQVTVS

SEQ ID NO: 24 - protein, 124 aa, synthetic construct
MAQVQLVESGGGLVQAGDSLQLSCAFSGGTFSTYAMGWFRQAPGKEREFVGGISRSGATTNYEDSVKGRFTISKDNTKNTVYLQLNSLKPEDTAVYYCAARNNILPVTTIDKYEYWGQGTQVTV

SEQ ID NO: 25 - protein, 128 aa, synthetic construct
MADVQLVESGGRSVRAGDSLRLSCLASGGTFSLYAMGWFRQAPGKEREFVAAVTWSGGSTYYTDSVKGRFSISRDNAKNTVYLQMNSLKPEDTAVYYCAVRTSGFFGSIPVTERAFDYWGQGTQVTVS

SEQ ID NO: 26 - protein, 129 aa, synthetic construct
MASGAAGGGLGEGLVQAGGSLRLSCAASGRTFNSYPMAWFRQAPGKEREFVAALGWSGGSTDYADSVKGRFTISRDNSKNTVYLEMNSLKPDDTGVYYCALRRRGGVYNTYSGEKDYDYWGQGTQVTVS

SEQ ID NO: 27 - protein, 126 aa, synthetic construct
MAQVQLVESGGGLVQAGGSLRLSCAASGRTYSISAMGWFRQAPGKEREFVAGISRSGGTTYYADPVKGRFTISRDNAKNTVYLQMNSLKPEDTAVYYCAARARGWTTFPAREIEYDYWGQGTQVTV

SEQ ID NO: 28 - protein, 128 aa, synthetic construct
MAQVQLVESGGGLVQTGGSLKLSCTASVRTLSYYHVGWFRQAPGKEREFVAGIHRSGESTFYADSVKGRFTISRDNAKNTVHLQMNSLKPEDTAVYYCAQRVRGFFGPLRSTPSWYDYWGQGTQVTVS

SEQ ID NO: 29 - protein, 128 aa, synthetic construct
MADVQLVESGGGLVQPGGSLRLSCEASGGAFSTVAMGWFRQAPGKEREFVGAITWTAGSTYYADSAKGRFTISRDNAKNTVHLQMNSLKPEDTAVYYCAQRVRGFFGPLRTTPSWYEYWGQGTQVTVS

SEQ ID NO: 30 - protein, 121 aa, synthetic construct
MAQVQLVESGGGLVQAGGSLRLSCAASGPTGAMAWFRQAPGKEREFVGGISRSGTDTYYVDSVKGRFTIDRDNAKNTVYLQMNSLKPEDTAVYYCAARRSQILFTSRTDYEFWGQGTQVTV

SEQ ID NO: 31 - protein, 122 aa, synthetic construct
MAQVQLVESGGGLVQAGGSLRLSCAASGPTGAMAWFRQAPGMEREFVGGISGSETDTYYADFVKGRLTVDRDNVKNTVDLQMNSLKPEDTAVYYCAARRRVTLFTSRADYDFWGQGTQVTVS

SEQ ID NO: 32 - protein, 122 aa, synthetic construct
MADVQLVESGGGLVQAGDSLRLSCAASGPTGAMAWFHQGLGKEREFVGGISPSGDNIYYADSVKGRFTIDRDNAKNTVSLQMNSLKPEDMGVYYCAARRRVTLFTSRTDYEFWGRGTQVTVS

SEQ ID NO: 33 - protein, 117 aa, synthetic construct
MADVQLVESGGGLVQPGGSLRLSCAASGEIASIIAIGWYRQAPGKQRESVALITRSGMITYGDSAQGRFTISRDDAKNTVYLHMDDLVPEDTAVYYCNAKKVSFGDYWGQGTQVTVS

SEQ ID NO: 34 - protein, 126 aa, synthetic construct
MAQVQLVESGGGLVQAGASMRLSCAASGITFSLYHWVWFRQAAGREHEFVAGIIRSGGETLSADSVKDRFIISRDDAKNTLYLQMNMLQPEDTATYYCAATHRADWYSSAFREYIFRGQGTQVTVS

SEQ ID NO: 35 - protein, 125 aa, synthetic construct
MADVQLVESGGGLVQAGGSLRLSCTASGLTISTYNIGWFRQAPGKEREFVGIIIRNGDTTYYADSVKGRFTISRDNAKNTVYLQMNSVKPADAAVYSCGATVRAGAAAEQYNSYIFRGQGTQVTV

SEQ ID NO: 36 - protein, 123 aa, synthetic construct
MAQVQLVESGGGLVQAGAALRLSCAASGGTFSFYNMGWFRQAPGKEREFVVSISRSGGGTAYADSVKGRFTISRDNAKNTAYLQMNSLKPEDTAVYYCAAGLRDWGREGEPHYWGQGTQVTVS

SEQ ID NO: 37 - protein, 128 aa, synthetic construct
MAQVQLVESGGGLVQAGGSLRLSCAASGRTFSTSAMGWFRQAPGREREFVAAITWTVGNTIYGDSMKGRFTISRDRTKNTVDLQMDSLKPEDTAVYYCTARSRGFVLSDLRSVDSFDYKGQGTQVTVS

SEQ ID NO: 38 - protein, 125 aa, synthetic construct
MADVQLVESGGGLVQAGGSLRLSCTVSGRTFSNYAMGWFRQAPGKEREFVAGISWTGGHTLYTDSVKGRFTISRDNAKNTVYLQMNSLKPEDTALYYCAADRAADFFAQRDEYDYWGQGTQVTVS

SEQ ID NO: 39 - protein, 127 aa, synthetic construct
MAQVQFVESGGGTVQDGDFLRLSCTASGDTFSNYHAGWFRQPPGREREFVAAISWTGEGTLYADSVKGQFTISRDNAKNAMYLQMNRLKPEDTAVYYCAAARSVGFTWRSSKSNDYAYWGQGTQVTV

SEQ ID NO: 40 - protein, 121 aa, synthetic construct
MADVQLVESGGGLVQAGGSLRLSCAASGPTGAMAWFRQAPGKEREFVGGISGSETDTYYVDSVKGRFTVDRDNVKNTVYLQMNSLKPEDTAVYYCAARRRITLFTSRTDYDFWGRGTQVTV

SEQ ID NO: 41 - protein, 131 aa, synthetic construct
MAQVQLVESGGGLVQAGGSLRLSCATSGFTFSDYAMGWFRQAPGKEREFVAAISWSGHVTDYADSVKGRFTISRDNVKNTVYLQMNSLKPEDTAVYSCAAAKSGTWWYQRSENDFGSWGQGTQVTVSKEAI

SEQ ID NO: 42 - protein, 129 aa, synthetic construct
MAQVQLVQSGGGLVQAGGSLRLSCAASGRTFSDIAVGWFRQTPGKEREFVAAISWSGLIINYGDSVEDRFTISRDNAKSAVYLQMNSLKPEDTAVYYCAARIGMNYYYAREIEYPYWGQGTQVTVSKCY

SEQ ID NO: 43 - protein, 129 aa, synthetic construct
MAQVQLVESGGSLVQPGGSLRLSCAASGRFAESSSMGWFRQAPGKEREFVAAISWSGGATNYADSAKGRFTLSRDNTKNTVYLQMNSLKPDDTAVYYCAANLGNYISSNQRLYGYWGQGTQVTVSSPFT

SEQ ID NO: 44 - protein, 123 aa, synthetic construct
MAQVQLVESGGGLVQAGGSLRLSCVASGSAPSFFAMAWYRQSPGNERELVAALSSLGSTNYADSVKGRFTISMDNAKNTVYLQMNNVNAEDTAVYYCAAGDFHSCYARKSCDYWGQGTQVTVS

SEQ ID NO: 45 - protein, 126 aa, synthetic construct
MAQVQLVESGGGLVQAGGSLRLSCAVSGRPFSEYNLGWFRQAPGKEREFVARIRSSGTTVYTDSVKGRFSASRDNAKNMGYLQLNSLEPEDTAVYYCAMSRVDTDSPAFYDYWGQGTQVTVSTPRS

SEQ ID NO: 46 - DNA, 7864 bp, synthetic construct
  source 1..7864: mol_type = other DNA
tctcgcgcgtttcggtgatgacggtgaaaacctctgacacatgcagctcccggagacggtcacagcttgtctgtaagcggatgccgggagcagacaagcccgtcagggcgcgtcagcgggtgttggcgggtgtcggggctggcttaactatgcggcatcagagcagattgtactgagagtgcaccatatgcggtgtgaaataccgcacagatgcgtaaggagaaaataccgcatcaggcgccattcgccattcaggctgcgcaactgttgggaagggcgatcggtgcgggcctcttcgctattacgccagctggcgaaagggggatgtgctgcaaggcgattaagttgggtaacgccagggttttcccagtcacgacgttgtaaaacgacggccagtgaattcaagctttattatttaaccctagaaagataatcatattgtgacgtacgttaaagataatcatgcgtaaaattgacgcatgtgttttatcggtctgtatatcgaggtttatttattaatttgaatagatattaagttttattatatttacacttacatactaataataaattcaacaaacaatttatttatgtttatttatttattaaaaaaaaacaaaaactcaaaatttcttctataaagtaacaaaacttttaaacattctctcttttacaaaaataaacttattttgtactttaaaaacagtcatgttgtaatcgataataagtaattagcttaacctatacataatagaaacaaattatacttattagtcagtcagaaacaactttggcacatatcaatattatgctctcgttaattaactcgagggatccggcgcgcctgtcattctaaatctctctttcagcctaaagctttttccccgtatccccccaggtgtctgcaggctcaaagagcagcgagaagcgttcagaggaaagcgatcccgtgccaccttccccgtgcccgggctgtccccgcacgctgccggctcggggatgcggggggagcgccggaccggagcggagccccgggcggctcgctgctgccccctagcgggggagggacgtaattacatccctgggggctttgggagggggctgtccccgtgagctcccaggcgcgcctgtcattctaaatctctctttcagcctaaagctttttccccgtatccccccaggtgtctgcaggctcaaagagcagcgagaagcgttcagaggaaagcgatcccgtgccaccttccccgtgcccgggctgtccccgcacgctgccggctcggggatgcggggggagcgccggaccggagcggagccccgggcggctcgctgctgccccctagcgggggagggacgtaattacatccctgggggctttgggggggggctgtccccgtgagctcccaggcgcgccgctagccaagaattcctcgagtttactccctatcagtgatagagaacgtatgaagagtttactccctatcagtgatagagaacgtatgcagactttactccctatcagtgatagagaacgtataaggagtttactccctatcagtgatagagaacgtatgaccagtttactccctatcagtgatagagaacgtatctacagtttactccctatcagtgatagagaacgtatatccagtttactccctatcagtgatagagaacgtataagctttaggcgtgtacggtgggcgcctataaaagcagagctcgtttagtgaaccgtcagatcgcctggagcaattccacaacacttttgtcttataccaactttccgtaccacttcctaccctcgtaaaccgcggtggcggccatcacaagtttgtacaaaaaagcaggcttggaaggagttcgaagccaccatgggcgttcaactggtggaaagcggcggtgctctggtacaaccgggcggtagtctgcgcctgagctgtgccgcaagcggtttcccagtcaaccgctactctatgcgttggtatcgccaggcgcctggtaaagaacgtgaatgggttgccggcatgagcagtgcgggcgatcgttctagttacgaggactctgttaaaggtcgttttacaattagccgtgatgatgcgcgcaataccgtgtatctgcaaatgaacagtctgaagccggaggacaccgcagtatattattgcaatgtcaacgtggggtttgaatattggggccaggggactcaggtgacggtgagctctggcagcattgtcatcatcactgtggtagcagccgcagtcataatgggcactgcaggcctcagcacgtacctctataaccgccagcggaagatcaagaaatacagactacaacaggcccaaaaagggacccccatgaaaccgaacacacaagccacgcctcccggaggatcctacccatacgacgtaccagattacgcttagaagctttaacagcttatcgataatcaacctctggattacaaaatttgtgaaagattgactggtattcttaactatgttgctccttttacgctatgtggatacgctgctttaatgcctttgtatcatgctattgcttcccgtatggctttcattttctcctccttgtataaatcctggttgctgtctctttatgaggagttgtggcccgttgtcaggcaacgtggcgtggtgtgcactgtgtttgctgacgcaacccccactggttggggcattgccaccacctgtcagctcctttccgggactttcgctttccccctccctattgccacggcggaactcatcgccgcctgccttgcccgctgctggacaggggctcggctgttgggcactgacaattccgtggtgttgtcggggaaatcatcgtcctttccttggctgctcgcctgtgttgccacctggattctgcgcgggacgtccttctgctacgtcccttcggccctcaatccagcggaccttccttcccgcggcctgctgccggctctgcggcctcttccgcgtcttcgccttcgccctcagacgagtcggatctccctttgggccgcctccccgcatcgataccgtcgactcgctgatcagcctcgactgtgccttctagttgccagccatctgttgtttgcccctcccccgtgccttccttgaccctggaaggtgccactcccactgtcctttcctaataaaatgaggaaattgcatcgcattgtctgagtaggtgtcattctattctggggggtggggtggggcaggacagcaagggggaggattgggaagacaatagcaggcatgctggggatgcggtgggctctatgggcaacccagctttcttgtacaaagtggtgatccaaccggcaagttaacaacaacaattgatctgcgatcgctccggtgcccgtcagtgggcagagcgcacatcgcccacagtccccgagaagttggggggaggggtcggcaattgaacgggtgcctagagaaggtggcgcggggtaaactgggaaagtgatgtcgtgtactggctccgcctttttcccgagggtgggggagaaccgtatataagtgcagtagtcgccgtgaacgttctttttcgcaacgggtttgccgccagaacacagctgaagcttcgaggggctcgcatctctccttcacgcgcccgccgccctacctgaggccgccatccacgccggttgagtcgcgttctgccgcctcccgcctgtggtgcctcctgaactgcgtccgccgtctaggtaagtttaaagctcaggtcgagaccgggcctttgtccggcgctcccttggagcctacctagactcagccggctctccacgctttgcctgaccctgcttgctcaactctacgtctttgtttcgttttctgttctgcgccgttacagatccaagctgtgaccggcgcctactctagagccgccatgtctagactggacaagagcaaagtcataaactctgctctggaattactcaatggagtcggtatcgaaggcctgacgacaaggaaactcgctcaaaagctgggagttgagcagcctaccctgtactggcacgtgaagaacaagcgggccctgctcgatgccctgccaatcgagatgctggacaggcatcatacccactcctgccccctggaaggcgagtcatggcaagactttctgcggaacaacgccaagtcataccgctgtgctctcctctcacatcgcgacggggctaaagtgcatctcggcacccgcccaacagagaaacagtacgaaaccctggaaaatcagctcgcgttcctgtgtcagcaaggcttctccctggagaacgcactgtacgctctgtccgccgtgggccactttacactgggctgcgtattggaggaacaggagcatcaagtagcaaaagaggaaagagagacacctaccaccgattctatgcccccacttctgaaacaagcaattgagctgttcgaccggcagggagccgaacctgccttccttttcggcctggaactaatcatatgtggcctggagaaacagctaaagtgcgaaagcggcgggccgaccgacgcccttgacgattttgacttagacatgctcccagccgatgcccttgacgactttgaccttgatatgctgcctgctgacgctcttgacgattttgaccttgacatgctccccggggagggcagaggagccactaacttctccctgttgaaacaagcaggggatgtcgaagagaatcccgggccaatgaccgagtacaagcccacggtgcgcctcgccacccgcgacgacgtccccagggccgtacgcaccctcgccgccgcgttcgccgactaccccgccacgcgccacaccgtcgatccggaccgccacatcgagcgggtcaccgagctgcaagaactcttcctcacgcgcgtcgggctcgacatcggcaaggtgtgggtcgcggacgacggcgccgcggtggcggtctggaccacgccggagagcgtcgaagcgggggcggtgttcgccgagatcggcccgcgcatggccgagttgagcggttcccggctggccgcgcagcaacagatggaaggcctcctggcgccgcaccggcccaaggagcccgcgtggttcctggccaccgtcggcgtctcgcccgaccaccagggcaagggtctgggcagcgccgtcgtgctccccggagtggaggcggccgagcgcgccggggtgcccgccttcctggaaacctccgcgccccgcaacctccccttctacgagcggctcggcttcaccgtcaccgccgacgtcgaggtgcccgaaggaccgcgcacctggtgcatgacccgcaagcccggtgcctgaatctataacaagaaaatatatatataataagttatcacgtaagtagaacatgaaataacaatataattatcgtatgagttaaatcttaaaagtcacgtaaaagataatcatgcgtcattttgactcacgcggtcgttatagttcaaaatcagtgacacttaccgcattgacaagcacgcctcacgggagctccaagcggcgactgagatgtcctaaatgcacagcgacggattcgcgctatttagaaagagagagcaatatttcaagaatgcatgcgtcaattttacgcagactatctttctagggttaaaaaaagcttggcgtaatcatggtcatagctgtttcctgtgtgaaattgttatccgctcacaattccacacaacatacgagccggaagcataaagtgtaaagcctggggtgcctaatgagtgagctaactcacattaattgcgttgcgctcactgcccgctttccagtcgggaaacctgtcgtgccagctgcattaatgaatcggccaacgcgcggggagaggcggtttgcgtattgggcgctcttccgcttcctcgctcactgactcgctgcgctcggtcgttcggctgcggcgagcggtatcagctcactcaaaggcggtaatacggttatccacagaatcaggggataacgcaggaaagaacatgtgagcaaaaggccagcaaaaggccaggaaccgtaaaaaggccgcgttgctggcgtttttccataggctccgcccccctgacgagcatcacaaaaatcgacgctcaagtcagaggtggcgaaacccgacaggactataaagataccaggcgtttccccctggaagctccctcgtgcgctctcctgttccgaccctgccgcttaccggatacctgtccgcctttctcccttcgggaagcgtggcgctttctcatagctcacgctgtaggtatctcagttcggtgtaggtcgttcgctccaagctgggctgtgtgcacgaaccccccgttcagcccgaccgctgcgccttatccggtaactatcgtcttgagtccaacccggtaagacacgacttatcgccactggcagcagccactggtaacaggattagcagagcgaggtatgtaggcggtgctacagagttcttgaagtggtggcctaactacggctacactagaagaacagtatttggtatctgcgctctgctgaagccagttaccttcggaaaaagagttggtagctcttgatccggcaaacaaaccaccgctggtagcggtggtttttttgtttgcaagcagcagattacgcgcagaaaaaaaggatctcaagaagatcctttgatcttttctacggggtctgacgctcagtggaacgaaaactcacgttaagggattttggtcatgagattatcaaaaaggatcttcacctagatccttttaaattaaaaatgaagttttaaatcaatctaaagtatatatgagtaaacttggtctgacagttaccaatgcttaatcagtgaggcacctatctcagcgatctgtctatttcgttcatccatagttgcctgactccccgtcgtgtagataactacgatacgggagggcttaccatctggccccagtgctgcaatgataccgcgagacccacgctcaccggctccagatttatcagcaataaaccagccagccggaagggccgagcgcagaagtggtcctgcaactttatccgcctccatccagtctattaattgttgccgggaagctagagtaagtagttcgccagttaatagtttgcgcaacgttgttgccattgctacaggcatcgtggtgtcacgctcgtcgtttggtatggcttcattcagctccggttcccaacgatcaaggcgagttacatgatcccccatgttgtgcaaaaaagcggttagctccttcggtcctccgatcgttgtcagaagtaagttggccgcagtgttatcactcatggttatggcagcactgcataattctcttactgtcatgccatccgtaagatgcttttctgtgactggtgagtactcaaccaagtcattctgagaatagtgtatgcggcgaccgagttgctcttgcccggcgtcaatacgggataataccgcgccacatagcagaactttaaaagtgctcatcattggaaaacgttcttcggggcgaaaactctcaaggatcttaccgctgttgagatccagttcgatgtaacccactcgtgcacccaactgatcttcagcatcttttactttcaccagcgtttctgggtgagcaaaaacaggaaggcaaaatgccgcaaaaaagggaataagggcgacacggaaatgttgaatactcatactcttcctttttcaatattattgaagcatttatcagggttattgtctcatgagcggatacatatttgaatgtatttagaaaaataaacaaataggggttccgcgcacatttccccgaaaagtgccacctgacgtctaagaaaccattattatcatgacattaacctataaaaataggcgtatcacgaggccctttcg

SEQ ID NO: 47 - DNA, 8053 bp, synthetic construct
  source 1..8053: mol_type = other DNA
tctcgcgcgtttcggtgatgacggtgaaaacctctgacacatgcagctcccggagacggtcacagcttgtctgtaagcggatgccgggagcagacaagcccgtcagggcgcgtcagcgggtgttggcgggtgtcggggctggcttaactatgcggcatcagagcagattgtactgagagtgcaccatatgcggtgtgaaataccgcacagatgcgtaaggagaaaataccgcatcaggcgccattcgccattcaggctgcgcaactgttgggaagggcgatcggtgcgggcctcttcgctattacgccagctggcgaaagggggatgtgctgcaaggcgattaagttgggtaacgccagggttttcccagtcacgacgttgtaaaacgacggccagtgaattcaagctttattatttaaccctagaaagataatcatattgtgacgtacgttaaagataatcatgcgtaaaattgacgcatgtgttttatcggtctgtatatcgaggtttatttattaatttgaatagatattaagttttattatatttacacttacatactaataataaattcaacaaacaatttatttatgtttatttatttattaaaaaaaaacaaaaactcaaaatttcttctataaagtaacaaaacttttaaacattctctcttttacaaaaataaacttattttgtactttaaaaacagtcatgttgtaatcgataataagtaattagcttaacctatacataatagaaacaaattatacttattagtcagtcagaaacaactttggcacatatcaatattatgctctcgttaattaactcgagggatccggcgcgcctgtcattctaaatctctctttcagcctaaagctttttccccgtatccccccaggtgtctgcaggctcaaagagcagcgagaagcgttcagaggaaagcgatcccgtgccaccttccccgtgcccgggctgtccccgcacgctgccggctcggggatgcggggggagcgccggaccggagcggagccccgggcggctcgctgctgccccctagcgggggagggacgtaattacatccctgggggctttgggagggggctgtccccgtgagctcccaggcgcgcctgtcattctaaatctctctttcagcctaaagctttttccccgtatccccccaggtgtctgcaggctcaaagagcagcgagaagcgttcagaggaaagcgatcccgtgccaccttccccgtgcccgggctgtccccgcacgctgccggctcggggatgcggggggagcgccggaccggagcggagccccgggcggctcgctgctgccccctagcgggggagggacgtaattacatccctgggggctttgggggggggctgtccccgtgagctcccaggcgcgccgctagccaagaattcctcgagtttactccctatcagtgatagagaacgtatgaagagtttactccctatcagtgatagagaacgtatgcagactttactccctatcagtgatagagaacgtataaggagtttactccctatcagtgatagagaacgtatgaccagtttactccctatcagtgatagagaacgtatctacagtttactccctatcagtgatagagaacgtatatccagtttactccctatcagtgatagagaacgtataagctttaggcgtgtacggtgggcgcctataaaagcagagctcgtttagtgaaccgtcagatcgcctggagcaattccacaacacttttgtcttataccaactttccgtaccacttcctaccctcgtaaaccgcggtggcggccatcacaagtttgtacaaaaaagcaggcttggaaggagttcgaagccaccatgggcgcggcccagccggccatggcgcaagttcagctggttgaatcaggtggtgggttagtccaggcaggaggtagtctgcgtcttagctgtgcagcgtctggttccatcttcagcagcaatgccatggcttggtatcgccaaactccggagaaacagcgggaactgatctgcgacattactcgtggaggcattaccaaatgcgccgattctgtgaaagggcgtttcaccatttcccgcgataacaccaagaatacggtgtatctccagatgaactcgctgaaatcggaagatacggcggtctactactgtgctgccaaaagcgaaggctactttggctttcctcgcgtagaaaacgagtatccgtattggggtcaaggcacacaggtgaccgtaggcttggaagtgctgtttcagggcccaagtctcgagcaccaccaccaccaccacaagccggaggacaccgcagtatattattgcaatgtcaacgtggggtttgaatattggggccaggggactcaggtgacggtgagctctggcagcattgtcatcatcactgtggtagcagccgcagtcataatgggcactgcaggcctcagcacgtacctctataaccgccagcggaagatcaagaaatacagactacaacaggcccaaaaagggacccccatgaaaccgaacacacaagccacgcctcccggaggatcctacccatacgacgtaccagattacgcttagaagctttaacagcttatcgataatcaacctctggattacaaaatttgtgaaagattgactggtattcttaactatgttgctccttttacgctatgtggatacgctgctttaatgcctttgtatcatgctattgcttcccgtatggctttcattttctcctccttgtataaatcctggttgctgtctctttatgaggagttgtggcccgttgtcaggcaacgtggcgtggtgtgcactgtgtttgctgacgcaacccccactggttggggcattgccaccacctgtcagctcctttccgggactttcgctttccccctccctattgccacggcggaactcatcgccgcctgccttgcccgctgctggacaggggctcggctgttgggcactgacaattccgtggtgttgtcggggaaatcatcgtcctttccttggctgctcgcctgtgttgccacctggattctgcgcgggacgtccttctgctacgtcccttcggccctcaatccagcggaccttccttcccgcggcctgctgccggctctgcggcctcttccgcgtcttcgccttcgccctcagacgagtcggatctccctttgggccgcctccccgcatcgataccgtcgactcgctgatcagcctcgactgtgccttctagttgccagccatctgttgtttgcccctcccccgtgccttccttgaccctggaaggtgccactcccactgtcctttcctaataaaatgaggaaattgcatcgcattgtctgagtaggtgtcattctattctggggggtggggtggggcaggacagcaagggggaggattgggaagacaatagcaggcatgctggggatgcggtgggctctatgggcaacccagctttcttgtacaaagtggtgatccaaccggcaagttaacaacaacaattgatctgcgatcgctccggtgcccgtcagtgggcagagcgcacatcgcccacagtccccgagaagttggggggaggggtcggcaattgaacgggtgcctagagaaggtggcgcggggtaaactgggaaagtgatgtcgtgtactggctccgcctttttcccgagggtgggggagaaccgtatataagtgcagtagtcgccgtgaacgttctttttcgcaacgggtttgccgccagaacacagctgaagcttcgaggggctcgcatctctccttcacgcgcccgccgccctacctgaggccgccatccacgccggttgagtcgcgttctgccgcctcccgcctgtggtgcctcctgaactgcgtccgccgtctaggtaagtttaaagctcaggtcgagaccgggcctttgtccggcgctcccttggagcctacctagactcagccggctctccacgctttgcctgaccctgcttgctcaactctacgtctttgtttcgttttctgttctgcgccgttacagatccaagctgtgaccggcgcctactctagagccgccatgtctagactggacaagagcaaagtcataaactctgctctggaattactcaatggagtcggtatcgaaggcctgacgacaaggaaactcgctcaaaagctgggagttgagcagcctaccctgtactggcacgtgaagaacaagcgggccctgctcgatgccctgccaatcgagatgctggacaggcatcatacccactcctgccccctggaaggcgagtcatggcaagactttctgcggaacaacgccaagtcataccgctgtgctctcctctcacatcgcgacggggctaaagtgcatctcggcacccgcccaacagagaaacagtacgaaaccctggaaaatcagctcgcgttcctgtgtcagcaaggcttctccctggagaacgcactgtacgctctgtccgccgtgggccactttacactgggctgcgtattggaggaacaggagcatcaagtagcaaaagaggaaagagagacacctaccaccgattctatgcccccacttctgaaacaagcaattgagctgttcgaccggcagggagccgaacctgccttccttttcggcctggaactaatcatatgtggcctggagaaacagctaaagtgcgaaagcggcgggccgaccgacgcccttgacgattttgacttagacatgctcccagccgatgcccttgacgactttgaccttgatatgctgcctgctgacgctcttgacgattttgaccttgacatgctccccggggagggcagaggagccactaacttctccctgttgaaacaagcaggggatgtcgaagagaatcccgggccaatgaccgagtacaagcccacggtgcgcctcgccacccgcgacgacgtccccagggccgtacgcaccctcgccgccgcgttcgccgactaccccgccacgcgccacaccgtcgatccggaccgccacatcgagcgggtcaccgagctgcaagaactcttcctcacgcgcgtcgggctcgacatcggcaaggtgtgggtcgcggacgacggcgccgcggtggcggtctggaccacgccggagagcgtcgaagcgggggcggtgttcgccgagatcggcccgcgcatggccgagttgagcggttcccggctggccgcgcagcaacagatggaaggcctcctggcgccgcaccggcccaaggagcccgcgtggttcctggccaccgtcggcgtctcgcccgaccaccagggcaagggtctgggcagcgccgtcgtgctccccggagtggaggcggccgagcgcgccggggtgcccgccttcctggaaacctccgcgccccgcaacctccccttctacgagcggctcggcttcaccgtcaccgccgacgtcgaggtgcccgaaggaccgcgcacctggtgcatgacccgcaagcccggtgcctgaatctataacaagaaaatatatatataataagttatcacgtaagtagaacatgaaataacaatataattatcgtatgagttaaatcttaaaagtcacgtaaaagataatcatgcgtcattttgactcacgcggtcgttatagttcaaaatcagtgacacttaccgcattgacaagcacgcctcacgggagctccaagcggcgactgagatgtcctaaatgcacagcgacggattcgcgctatttagaaagagagagcaatatttcaagaatgcatgcgtcaattttacgcagactatctttctagggttaaaaaaagcttggcgtaatcatggtcatagctgtttcctgtgtgaaattgttatccgctcacaattccacacaacatacgagccggaagcataaagtgtaaagcctggggtgcctaatgagtgagctaactcacattaattgcgttgcgctcactgcccgctttccagtcgggaaacctgtcgtgccagctgcattaatgaatcggccaacgcgcggggagaggcggtttgcgtattgggcgctcttccgcttcctcgctcactgactcgctgcgctcggtcgttcggctgcggcgagcggtatcagctcactcaaaggcggtaatacggttatccacagaatcaggggataacgcaggaaagaacatgtgagcaaaaggccagcaaaaggccaggaaccgtaaaaaggccgcgttgctggcgtttttccataggctccgcccccctgacgagcatcacaaaaatcgacgctcaagtcagaggtggcgaaacccgacaggactataaagataccaggcgtttccccctggaagctccctcgtgcgctctcctgttccgaccctgccgcttaccggatacctgtccgcctttctcccttcgggaagcgtggcgctttctcatagctcacgctgtaggtatctcagttcggtgtaggtcgttcgctccaagctgggctgtgtgcacgaaccccccgttcagcccgaccgctgcgccttatccggtaactatcgtcttgagtccaacccggtaagacacgacttatcgccactggcagcagccactggtaacaggattagcagagcgaggtatgtaggcggtgctacagagttcttgaagtggtggcctaactacggctacactagaagaacagtatttggtatctgcgctctgctgaagccagttaccttcggaaaaagagttggtagctcttgatccggcaaacaaaccaccgctggtagcggtggtttttttgtttgcaagcagcagattacgcgcagaaaaaaaggatctcaagaagatcctttgatcttttctacggggtctgacgctcagtggaacgaaaactcacgttaagggattttggtcatgagattatcaaaaaggatcttcacctagatccttttaaattaaaaatgaagttttaaatcaatctaaagtatatatgagtaaacttggtctgacagttaccaatgcttaatcagtgaggcacctatctcagcgatctgtctatttcgttcatccatagttgcctgactccccgtcgtgtagataactacgatacgggagggcttaccatctggccccagtgctgcaatgataccgcgagacccacgctcaccggctccagatttatcagcaataaaccagccagccggaagggccgagcgcagaagtggtcctgcaactttatccgcctccatccagtctattaattgttgccgggaagctagagtaagtagttcgccagttaatagtttgcgcaacgttgttgccattgctacaggcatcgtggtgtcacgctcgtcgtttggtatggcttcattcagctccggttcccaacgatcaaggcgagttacatgatcccccatgttgtgcaaaaaagcggttagctccttcggtcctccgatcgttgtcagaagtaagttggccgcagtgttatcactcatggttatggcagcactgcataattctcttactgtcatgccatccgtaagatgcttttctgtgactggtgagtactcaaccaagtcattctgagaatagtgtatgcggcgaccgagttgctcttgcccggcgtcaatacgggataataccgcgccacatagcagaactttaaaagtgctcatcattggaaaacgttcttcggggcgaaaactctcaaggatcttaccgctgttgagatccagttcgatgtaacccactcgtgcacccaactgatcttcagcatcttttactttcaccagcgtttctgggtgagcaaaaacaggaaggcaaaatgccgcaaaaaagggaataagggcgacacggaaatgttgaatactcatactcttcctttttcaatattattgaagcatttatcagggttattgtctcatgagcggatacatatttgaatgtatttagaaaaataaacaaataggggttccgcgcacatttccccgaaaagtgccacctgacgtctaagaaaccattattatcatgacattaacctataaaaataggcgtatcacgaggccctttcg

SEQ ID NO: 48 - DNA, 8056 bp, synthetic construct
  source 1..8056: mol_type = other DNA
tctcgcgcgtttcggtgatgacggtgaaaacctctgacacatgcagctcccggagacggtcacagcttgtctgtaagcggatgccgggagcagacaagcccgtcagggcgcgtcagcgggtgttggcgggtgtcggggctggcttaactatgcggcatcagagcagattgtactgagagtgcaccatatgcggtgtgaaataccgcacagatgcgtaaggagaaaataccgcatcaggcgccattcgccattcaggctgcgcaactgttgggaagggcgatcggtgcgggcctcttcgctattacgccagctggcgaaagggggatgtgctgcaaggcgattaagttgggtaacgccagggttttcccagtcacgacgttgtaaaacgacggccagtgaattcaagctttattatttaaccctagaaagataatcatattgtgacgtacgttaaagataatcatgcgtaaaattgacgcatgtgttttatcggtctgtatatcgaggtttatttattaatttgaatagatattaagttttattatatttacacttacatactaataataaattcaacaaacaatttatttatgtttatttatttattaaaaaaaaacaaaaactcaaaatttcttctataaagtaacaaaacttttaaacattctctcttttacaaaaataaacttattttgtactttaaaaacagtcatgttgtaatcgataataagtaattagcttaacctatacataatagaaacaaattatacttattagtcagtcagaaacaactttggcacatatcaatattatgctctcgttaattaactcgagggatccggcgcgcctgtcattctaaatctctctttcagcctaaagctttttccccgtatccccccaggtgtctgcaggctcaaagagcagcgagaagcgttcagaggaaagcgatcccgtgccaccttccccgtgcccgggctgtccccgcacgctgccggctcggggatgcggggggagcgccggaccggagcggagccccgggcggctcgctgctgccccctagcgggggagggacgtaattacatccctgggggctttgggagggggctgtccccgtgagctcccaggcgcgcctgtcattctaaatctctctttcagcctaaagctttttccccgtatccccccaggtgtctgcaggctcaaagagcagcgagaagcgttcagaggaaagcgatcccgtgccaccttccccgtgcccgggctgtccccgcacgctgccggctcggggatgcggggggagcgccggaccggagcggagccccgggcggctcgctgctgccccctagcgggggagggacgtaattacatccctgggggctttgggggggggctgtccccgtgagctcccaggcgcgccgctagccaagaattcctcgagtttactccctatcagtgatagagaacgtatgaagagtttactccctatcagtgatagagaacgtatgcagactttactccctatcagtgatagagaacgtataaggagtttactccctatcagtgatagagaacgtatgaccagtttactccctatcagtgatagagaacgtatctacagtttactccctatcagtgatagagaacgtatatccagtttactccctatcagtgatagagaacgtataagctttaggcgtgtacggtgggcgcctataaaagcagagctcgtttagtgaaccgtcagatcgcctggagcaattccacaacacttttgtcttataccaactttccgtaccacttcctaccctcgtaaaccgcggtggcggccatcacaagtttgtacaaaaaagcaggcttggaaggagttcgaagccaccatgggcgcggcccagccggccatggcccaggttcagcttgtggaatctggtggcggactggttcaagccggtggttccttacggttgtcctgtgcggcatctggtcgtaccttcagcacgagtgcgatggcatggttccgtcaagcacctgggaaagaacgcgaatttgcggctgggattacgtggatttcgagcagtacctactacaccgattcagtgaaaggccgctttaccatctcacgcgacaatgcgaagaatacggtgtatctgcagatgaactcgctgaaaccggaagatacagccgtctactattgcgctgcgaaaagcgaaggctatttcggctttccgcgtgtagagaacgagtatccgtattggggtcaaggcactcaggtcactgtaggactggaagtgctctttcagggcccaagcctcgagcaccaccaccaccaccacaagccggaggacaccgcagtatattattgcaatgtcaacgtggggtttgaatattggggccaggggactcaggtgacggtgagctctggcagcattgtcatcatcactgtggtagcagccgcagtcataatgggcactgcaggcctcagcacgtacctctataaccgccagcggaagatcaagaaatacagactacaacaggcccaaaaagggacccccatgaaaccgaacacacaagccacgcctcccggaggatcctacccatacgacgtaccagattacgcttagaagctttaacagcttatcgataatcaacctctggattacaaaatttgtgaaagattgactggtattcttaactatgttgctccttttacgctatgtggatacgctgctttaatgcctttgtatcatgctattgcttcccgtatggctttcattttctcctccttgtataaatcctggttgctgtctctttatgaggagttgtggcccgttgtcaggcaacgtggcgtggtgtgcactgtgtttgctgacgcaacccccactggttggggcattgccaccacctgtcagctcctttccgggactttcgctttccccctccctattgccacggcggaactcatcgccgcctgccttgcccgctgctggacaggggctcggctgttgggcactgacaattccgtggtgttgtcggggaaatcatcgtcctttccttggctgctcgcctgtgttgccacctggattctgcgcgggacgtccttctgctacgtcccttcggccctcaatccagcggaccttccttcccgcggcctgctgccggctctgcggcctcttccgcgtcttcgccttcgccctcagacgagtcggatctccctttgggccgcctccccgcatcgataccgtcgactcgctgatcagcctcgactgtgccttctagttgccagccatctgttgtttgcccctcccccgtgccttccttgaccctggaaggtgccactcccactgtcctttcctaataaaatgaggaaattgcatcgcattgtctgagtaggtgtcattctattctggggggtggggtggggcaggacagcaagggggaggattgggaagacaatagcaggcatgctggggatgcggtgggctctatgggcaacccagctttcttgtacaaagtggtgatccaaccggcaagttaacaacaacaattgatctgcgatcgctccggtgcccgtcagtgggcagagcgcacatcgcccacagtccccgagaagttggggggaggggtcggcaattgaacgggtgcctagagaaggtggcgcggggtaaactgggaaagtgatgtcgtgtactggctccgcctttttcccgagggtgggggagaaccgtatataagtgcagtagtcgccgtgaacgttctttttcgcaacgggtttgccgccagaacacagctgaagcttcgaggggctcgcatctctccttcacgcgcccgccgccctacctgaggccgccatccacgccggttgagtcgcgttctgccgcctcccgcctgtggtgcctcctgaactgcgtccgccgtctaggtaagtttaaagctcaggtcgagaccgggcctttgtccggcgctcccttggagcctacctagactcagccggctctccacgctttgcctgaccctgcttgctcaactctacgtctttgtttcgttttctgttctgcgccgttacagatccaagctgtgaccggcgcctactctagagccgccatgtctagactggacaagagcaaagtcataaactctgctctggaattactcaatggagtcggtatcgaaggcctgacgacaaggaaactcgctcaaaagctgggagttgagcagcctaccctgtactggcacgtgaagaacaagcgggccctgctcgatgccctgccaatcgagatgctggacaggcatcatacccactcctgccccctggaaggcgagtcatggcaagactttctgcggaacaacgccaagtcataccgctgtgctctcctctcacatcgcgacggggctaaagtgcatctcggcacccgcccaacagagaaacagtacgaaaccctggaaaatcagctcgcgttcctgtgtcagcaaggcttctccctggagaacgcactgtacgctctgtccgccgtgggccactttacactgggctgcgtattggaggaacaggagcatcaagtagcaaaagaggaaagagagacacctaccaccgattctatgcccccacttctgaaacaagcaattgagctgttcgaccggcagggagccgaacctgccttccttttcggcctggaactaatcatatgtggcctggagaaacagctaaagtgcgaaagcggcgggccgaccgacgcccttgacgattttgacttagacatgctcccagccgatgcccttgacgactttgaccttgatatgctgcctgctgacgctcttgacgattttgaccttgacatgctccccggggagggcagaggagccactaacttctccctgttgaaacaagcaggggatgtcgaagagaatcccgggccaatgaccgagtacaagcccacggtgcgcctcgccacccgcgacgacgtccccagggccgtacgcaccctcgccgccgcgttcgccgactaccccgccacgcgccacaccgtcgatccggaccgccacatcgagcgggtcaccgagctgcaagaactcttcctcacgcgcgtcgggctcgacatcggcaaggtgtgggtcgcggacgacggcgccgcggtggcggtctggaccacgccggagagcgtcgaagcgggggcggtgttcgccgagatcggcccgcgcatggccgagttgagcggttcccggctggccgcgcagcaacagatggaaggcctcctggcgccgcaccggcccaaggagcccgcgtggttcctggccaccgtcggcgtctcgcccgaccaccagggcaagggtctgggcagcgccgtcgtgctccccggagtggaggcggccgagcgcgccggggtgcccgccttcctggaaacctccgcgccccgcaacctccccttctacgagcggctcggcttcaccgtcaccgccgacgtcgaggtgcccgaaggaccgcgcacctggtgcatgacccgcaagcccggtgcctgaatctataacaagaaaatatatatataataagttatcacgtaagtagaacatgaaataacaatataattatcgtatgagttaaatcttaaaagtcacgtaaaagataatcatgcgtcattttgactcacgcggtcgttatagttcaaaatcagtgacacttaccgcattgacaagcacgcctcacgggagctccaagcggcgactgagatgtcctaaatgcacagcgacggattcgcgctatttagaaagagagagcaatatttcaagaatgcatgcgtcaattttacgcagactatctttctagggttaaaaaaagcttggcgtaatcatggtcatagctgtttcctgtgtgaaattgttatccgctcacaattccacacaacatacgagccggaagcataaagtgtaaagcctggggtgcctaatgagtgagctaactcacattaattgcgttgcgctcactgcccgctttccagtcgggaaacctgtcgtgccagctgcattaatgaatcggccaacgcgcggggagaggcggtttgcgtattgggcgctcttccgcttcctcgctcactgactcgctgcgctcggtcgttcggctgcggcgagcggtatcagctcactcaaaggcggtaatacggttatccacagaatcaggggataacgcaggaaagaacatgtgagcaaaaggccagcaaaaggccaggaaccgtaaaaaggccgcgttgctggcgtttttccataggctccgcccccctgacgagcatcacaaaaatcgacgctcaagtcagaggtggcgaaacccgacaggactataaagataccaggcgtttccccctggaagctccctcgtgcgctctcctgttccgaccctgccgcttaccggatacctgtccgcctttctcccttcgggaagcgtggcgctttctcatagctcacgctgtaggtatctcagttcggtgtaggtcgttcgctccaagctgggctgtgtgcacgaaccccccgttcagcccgaccgctgcgccttatccggtaactatcgtcttgagtccaacccggtaagacacgacttatcgccactggcagcagccactggtaacaggattagcagagcgaggtatgtaggcggtgctacagagttcttgaagtggtggcctaactacggctacactagaagaacagtatttggtatctgcgctctgctgaagccagttaccttcggaaaaagagttggtagctcttgatccggcaaacaaaccaccgctggtagcggtggtttttttgtttgcaagcagcagattacgcgcagaaaaaaaggatctcaagaagatcctttgatcttttctacggggtctgacgctcagtggaacgaaaactcacgttaagggattttggtcatgagattatcaaaaaggatcttcacctagatccttttaaattaaaaatgaagttttaaatcaatctaaagtatatatgagtaaacttggtctgacagttaccaatgcttaatcagtgaggcacctatctcagcgatctgtctatttcgttcatccatagttgcctgactccccgtcgtgtagataactacgatacgggagggcttaccatctggccccagtgctgcaatgataccgcgagacccacgctcaccggctccagatttatcagcaataaaccagccagccggaagggccgagcgcagaagtggtcctgcaactttatccgcctccatccagtctattaattgttgccgggaagctagagtaagtagttcgccagttaatagtttgcgcaacgttgttgccattgctacaggcatcgtggtgtcacgctcgtcgtttggtatggcttcattcagctccggttcccaacgatcaaggcgagttacatgatcccccatgttgtgcaaaaaagcggttagctccttcggtcctccgatcgttgtcagaagtaagttggccgcagtgttatcactcatggttatggcagcactgcataattctcttactgtcatgccatccgtaagatgcttttctgtgactggtgagtactcaaccaagtcattctgagaatagtgtatgcggcgaccgagttgctcttgcccggcgtcaatacgggataataccgcgccacatagcagaactttaaaagtgctcatcattggaaaacgttcttcggggcgaaaactctcaaggatcttaccgctgttgagatccagttcgatgtaacccactcgtgcacccaactgatcttcagcatcttttactttcaccagcgtttctgggtgagcaaaaacaggaaggcaaaatgccgcaaaaaagggaataagggcgacacggaaatgttgaatactcatactcttcctttttcaatattattgaagcatttatcagggttattgtctcatgagcggatacatatttgaatgtatttagaaaaataaacaaataggggttccgcgcacatttccccgaaaagtgccacctgacgtctaagaaaccattattatcatgacattaacctataaaaataggcgtatcacgaggccctttcg

SEQ ID NO: 49 - DNA, 8062 bp, synthetic construct
  source 1..8062: mol_type = other DNA
tctcgcgcgtttcggtgatgacggtgaaaacctctgacacatgcagctcccggagacggtcacagcttgtctgtaagcggatgccgggagcagacaagcccgtcagggcgcgtcagcgggtgttggcgggtgtcggggctggcttaactatgcggcatcagagcagattgtactgagagtgcaccatatgcggtgtgaaataccgcacagatgcgtaaggagaaaataccgcatcaggcgccattcgccattcaggctgcgcaactgttgggaagggcgatcggtgcgggcctcttcgctattacgccagctggcgaaagggggatgtgctgcaaggcgattaagttgggtaacgccagggttttcccagtcacgacgttgtaaaacgacggccagtgaattcaagctttattatttaaccctagaaagataatcatattgtgacgtacgttaaagataatcatgcgtaaaattgacgcatgtgttttatcggtctgtatatcgaggtttatttattaatttgaatagatattaagttttattatatttacacttacatactaataataaattcaacaaacaatttatttatgtttatttatttattaaaaaaaaacaaaaactcaaaatttcttctataaagtaacaaaacttttaaacattctctcttttacaaaaataaacttattttgtactttaaaaacagtcatgttgtaatcgataataagtaattagcttaacctatacataatagaaacaaattatacttattagtcagtcagaaacaactttggcacatatcaatattatgctctcgttaattaactcgagggatccggcgcgcctgtcattctaaatctctctttcagcctaaagctttttccccgtatccccccaggtgtctgcaggctcaaagagcagcgagaagcgttcagaggaaagcgatcccgtgccaccttccccgtgcccgggctgtccccgcacgctgccggctcggggatgcggggggagcgccggaccggagcggagccccgggcggctcgctgctgccccctagcgggggagggacgtaattacatccctgggggctttgggagggggctgtccccgtgagctcccaggcgcgcctgtcattctaaatctctctttcagcctaaagctttttccccgtatccccccaggtgtctgcaggctcaaagagcagcgagaagcgttcagaggaaagcgatcccgtgccaccttccccgtgcccgggctgtccccgcacgctgccggctcggggatgcggggggagcgccggaccggagcggagccccgggcggctcgctgctgccccctagcgggggagggacgtaattacatccctgggggctttgggggggggctgtccccgtgagctcccaggcgcgccgctagccaagaattcctcgagtttactccctatcagtgatagagaacgtatgaagagtttactccctatcagtgatagagaacgtatgcagactttactccctatcagtgatagagaacgtataaggagtttactccctatcagtgatagagaacgtatgaccagtttactccctatcagtgatagagaacgtatctacagtttactccctatcagtgatagagaacgtatatccagtttactccctatcagtgatagagaacgtataagctttaggcgtgtacggtgggcgcctataaaagcagagctcgtttagtgaaccgtcagatcgcctggagcaattccacaacacttttgtcttataccaactttccgtaccacttcctaccctcgtaaaccgcggtggcggccatcacaagtttgtacaaaaaagcaggcttggaaggagttcgaagccaccatgggcgcggcccagccggccatggctggatccatggcacaggttcaactggtcgaaagtggtggtgggttggtgcagcatggtggctcattacgcctcagttgcgtcacttcgggctttaccttcgacatccacgatatgggctggtttcgtcaggcaccagggaaagagcgcgatattgttgcccgcattagcaaatctggcgatatcacctactatgccgattcggtgaaaggacgcttcatcatttctcgggacaataccaagaacacggtgtatctgcagatgaacagcctgaaaccggaagatacggcggtttactactgtgctgcgacacttcgtgcgacgattacctcctttgacgagtatgtctatcgtggccaaggtactcaggtaaccgtaagcggtctggaagtgctgttccaaggaccgtccctcgagcaccaccaccaccaccacaagccggaggacaccgcagtatattattgcaatgtcaacgtggggtttgaatattggggccaggggactcaggtgacggtgagctctggcagcattgtcatcatcactgtggtagcagccgcagtcataatgggcactgcaggcctcagcacgtacctctataaccgccagcggaagatcaagaaatacagactacaacaggcccaaaaagggacccccatgaaaccgaacacacaagccacgcctcccggaggatcctacccatacgacgtaccagattacgcttagaagctttaacagcttatcgataatcaacctctggattacaaaatttgtgaaagattgactggtattcttaactatgttgctccttttacgctatgtggatacgctgctttaatgcctttgtatcatgctattgcttcccgtatggctttcattttctcctccttgtataaatcctggttgctgtctctttatgaggagttgtggcccgttgtcaggcaacgtggcgtggtgtgcactgtgtttgctgacgcaacccccactggttggggcattgccaccacctgtcagctcctttccgggactttcgctttccccctccctattgccacggcggaactcatcgccgcctgccttgcccgctgctggacaggggctcggctgttgggcactgacaattccgtggtgttgtcggggaaatcatcgtcctttccttggctgctcgcctgtgttgccacctggattctgcgcgggacgtccttctgctacgtcccttcggccctcaatccagcggaccttccttcccgcggcctgctgccggctctgcggcctcttccgcgtcttcgccttcgccctcagacgagtcggatctccctttgggccgcctccccgcatcgataccgtcgactcgctgatcagcctcgactgtgccttctagttgccagccatctgttgtttgcccctcccccgtgccttccttgaccctggaaggtgccactcccactgtcctttcctaataaaatgaggaaattgcatcgcattgtctgagtaggtgtcattctattctggggggtggggtggggcaggacagcaagggggaggattgggaagacaatagcaggcatgctggggatgcggtgggctctatgggcaacccagctttcttgtacaaagtggtgatccaaccggcaagttaacaacaacaattgatctgcgatcgctccggtgcccgtcagtgggcagagcgcacatcgcccacagtccccgagaagttggggggaggggtcggcaattgaacgggtgcctagagaaggtggcgcggggtaaactgggaaagtgatgtcgtgtactggctccgcctttttcccgagggtgggggagaaccgtatataagtgcagtagtcgccgtgaacgttctttttcgcaacgggtttgccgccagaacacagctgaagcttcgaggggctcgcatctctccttcacgcgcccgccgccctacctgaggccgccatccacgccggttgagtcgcgttctgccgcctcccgcctgtggtgcctcctgaactgcgtccgccgtctaggtaagtttaaagctcaggtcgagaccgggcctttgtccggcgctcccttggagcctacctagactcagccggctctccacgctttgcctgaccctgcttgctcaactctacgtctttgtttcgttttctgttctgcgccgttacagatccaagctgtgaccggcgcctactctagagccgccatgtctagactggacaagagcaaagtcataaactctgctctggaattactcaatggagtcggtatcgaaggcctgacgacaaggaaactcgctcaaaagctgggagttgagcagcctaccctgtactggcacgtgaagaacaagcgggccctgctcgatgccctgccaatcgagatgctggacaggcatcatacccactcctgccccctggaaggcgagtcatggcaagactttctgcggaacaacgccaagtcataccgctgtgctctcctctcacatcgcgacggggctaaagtgcatctcggcacccgcccaacagagaaacagtacgaaaccctggaaaatcagctcgcgttcctgtgtcagcaaggcttctccctggagaacgcactgtacgctctgtccgccgtgggccactttacactgggctgcgtattggaggaacaggagcatcaagtagcaaaagaggaaagagagacacctaccaccgattctatgcccccacttctgaaacaagcaattgagctgttcgaccggcagggagccgaacctgccttccttttcggcctggaactaatcatatgtggcctggagaaacagctaaagtgcgaaagcggcgggccgaccgacgcccttgacgattttgacttagacatgctcccagccgatgcccttgacgactttgaccttgatatgctgcctgctgacgctcttgacgattttgaccttgacatgctccccggggagggcagaggagccactaacttctccctgttgaaacaagcaggggatgtcgaagagaatcccgggccaatgaccgagtacaagcccacggtgcgcctcgccacccgcgacgacgtccccagggccgtacgcaccctcgccgccgcgttcgccgactaccccgccacgcgccacaccgtcgatccggaccgccacatcgagcgggtcaccgagctgcaagaactcttcctcacgcgcgtcgggctcgacatcggcaaggtgtgggtcgcggacgacggcgccgcggtggcggtctggaccacgccggagagcgtcgaagcgggggcggtgttcgccgagatcggcccgcgcatggccgagttgagcggttcccggctggccgcgcagcaacagatggaaggcctcctggcgccgcaccggcccaaggagcccgcgtggttcctggccaccgtcggcgtctcgcccgaccaccagggcaagggtctgggcagcgccgtcgtgctccccggagtggaggcggccgagcgcgccggggtgcccgccttcctggaaacctccgcgccccgcaacctccccttctacgagcggctcggcttcaccgtcaccgccgacgtcgaggtgcccgaaggaccgcgcacctggtgcatgacccgcaagcccggtgcctgaatctataacaagaaaatatatatataataagttatcacgtaagtagaacatgaaataacaatataattatcgtatgagttaaatcttaaaagtcacgtaaaagataatcatgcgtcattttgactcacgcggtcgttatagttcaaaatcagtgacacttaccgcattgacaagcacgcctcacgggagctccaagcggcgactgagatgtcctaaatgcacagcgacggattcgcgctatttagaaagagagagcaatatttcaagaatgcatgcgtcaattttacgcagactatctttctagggttaaaaaaagcttggcgtaatcatggtcatagctgtttcctgtgtgaaattgttatccgctcacaattccacacaacatacgagccggaagcataaagtgtaaagcctggggtgcctaatgagtgagctaactcacattaattgcgttgcgctcactgcccgctttccagtcgggaaacctgtcgtgccagctgcattaatgaatcggccaacgcgcggggagaggcggtttgcgtattgggcgctcttccgcttcctcgctcactgactcgctgcgctcggtcgttcggctgcggcgagcggtatcagctcactcaaaggcggtaatacggttatccacagaatcaggggataacgcaggaaagaacatgtgagcaaaaggccagcaaaaggccaggaaccgtaaaaaggccgcgttgctggcgtttttccataggctccgcccccctgacgagcatcacaaaaatcgacgctcaagtcagaggtggcgaaacccgacaggactataaagataccaggcgtttccccctggaagctccctcgtgcgctctcctgttccgaccctgccgcttaccggatacctgtccgcctttctcccttcgggaagcgtggcgctttctcatagctcacgctgtaggtatctcagttcggtgtaggtcgttcgctccaagctgggctgtgtgcacgaaccccccgttcagcccgaccgctgcgccttatccggtaactatcgtcttgagtccaacccggtaagacacgacttatcgccactggcagcagccactggtaacaggattagcagagcgaggtatgtaggcggtgctacagagttcttgaagtggtggcctaactacggctacactagaagaacagtatttggtatctgcgctctgctgaagccagttaccttcggaaaaagagttggtagctcttgatccggcaaacaaaccaccgctggtagcggtggtttttttgtttgcaagcagcagattacgcgcagaaaaaaaggatctcaagaagatcctttgatcttttctacggggtctgacgctcagtggaacgaaaactcacgttaagggattttggtcatgagattatcaaaaaggatcttcacctagatccttttaaattaaaaatgaagttttaaatcaatctaaagtatatatgagtaaacttggtctgacagttaccaatgcttaatcagtgaggcacctatctcagcgatctgtctatttcgttcatccatagttgcctgactccccgtcgtgtagataactacgatacgggagggcttaccatctggccccagtgctgcaatgataccgcgagacccacgctcaccggctccagatttatcagcaataaaccagccagccggaagggccgagcgcagaagtggtcctgcaactttatccgcctccatccagtctattaattgttgccgggaagctagagtaagtagttcgccagttaatagtttgcgcaacgttgttgccattgctacaggcatcgtggtgtcacgctcgtcgtttggtatggcttcattcagctccggttcccaacgatcaaggcgagttacatgatcccccatgttgtgcaaaaaagcggttagctccttcggtcctccgatcgttgtcagaagtaagttggccgcagtgttatcactcatggttatggcagcactgcataattctcttactgtcatgccatccgtaagatgcttttctgtgactggtgagtactcaaccaagtcattctgagaatagtgtatgcggcgaccgagttgctcttgcccggcgtcaatacgggataataccgcgccacatagcagaactttaaaagtgctcatcattggaaaacgttcttcggggcgaaaactctcaaggatcttaccgctgttgagatccagttcgatgtaacccactcgtgcacccaactgatcttcagcatcttttactttcaccagcgtttctgggtgagcaaaaacaggaaggcaaaatgccgcaaaaaagggaataagggcgacacggaaatgttgaatactcatactcttcctttttcaatattattgaagcatttatcagggttattgtctcatgagcggatacatatttgaatgtatttagaaaaataaacaaataggggttccgcgcacatttccccgaaaagtgccacctgacgtctaagaaaccattattatcatgacattaacctataaaaataggcgtatcacgaggccctttcg

SEQ ID NO: 50 - DNA, 8062 bp, synthetic construct
  source 1..8062: mol_type = other DNA
tctcgcgcgtttcggtgatgacggtgaaaacctctgacacatgcagctcccggagacggtcacagcttgtctgtaagcggatgccgggagcagacaagcccgtcagggcgcgtcagcgggtgttggcgggtgtcggggctggcttaactatgcggcatcagagcagattgtactgagagtgcaccatatgcggtgtgaaataccgcacagatgcgtaaggagaaaataccgcatcaggcgccattcgccattcaggctgcgcaactgttgggaagggcgatcggtgcgggcctcttcgctattacgccagctggcgaaagggggatgtgctgcaaggcgattaagttgggtaacgccagggttttcccagtcacgacgttgtaaaacgacggccagtgaattcaagctttattatttaaccctagaaagataatcatattgtgacgtacgttaaagataatcatgcgtaaaattgacgcatgtgttttatcggtctgtatatcgaggtttatttattaatttgaatagatattaagttttattatatttacacttacatactaataataaattcaacaaacaatttatttatgtttatttatttattaaaaaaaaacaaaaactcaaaatttcttctataaagtaacaaaacttttaaacattctctcttttacaaaaataaacttattttgtactttaaaaacagtcatgttgtaatcgataataagtaattagcttaacctatacataatagaaacaaattatacttattagtcagtcagaaacaactttggcacatatcaatattatgctctcgttaattaactcgagggatccggcgcgcctgtcattctaaatctctctttcagcctaaagctttttccccgtatccccccaggtgtctgcaggctcaaagagcagcgagaagcgttcagaggaaagcgatcccgtgccaccttccccgtgcccgggctgtccccgcacgctgccggctcggggatgcggggggagcgccggaccggagcggagccccgggcggctcgctgctgccccctagcgggggagggacgtaattacatccctgggggctttgggagggggctgtccccgtgagctcccaggcgcgcctgtcattctaaatctctctttcagcctaaagctttttccccgtatccccccaggtgtctgcaggctcaaagagcagcgagaagcgttcagaggaaagcgatcccgtgccaccttccccgtgcccgggctgtccccgcacgctgccggctcggggatgcggggggagcgccggaccggagcggagccccgggcggctcgctgctgccccctagcgggggagggacgtaattacatccctgggggctttgggggggggctgtccccgtgagctcccaggcgcgccgctagccaagaattcctcgagtttactccctatcagtgatagagaacgtatgaagagtttactccctatcagtgatagagaacgtatgcagactttactccctatcagtgatagagaacgtataaggagtttactccctatcagtgatagagaacgtatgaccagtttactccctatcagtgatagagaacgtatctacagtttactccctatcagtgatagagaacgtatatccagtttactccctatcagtgatagagaacgtataagctttaggcgtgtacggtgggcgcctataaaagcagagctcgtttagtgaaccgtcagatcgcctggagcaattccacaacacttttgtcttataccaactttccgtaccacttcctaccctcgtaaaccgcggtggcggccatcacaagtttgtacaaaaaagcaggcttggaaggagttcgaagccaccatgggcgcggcccagccggccatggctggatccatggcgcaagtacagctggtagaaagcggtggtggcttggtccaagctggcgattcactgcagctgagttgtgcgtttagcggaggtacgttctcgacatatgccatggggtggtttcgtcaggcacctggcaaagaacgcgaattcgttggaggcatttctcgcagtggtgccacgacgaattacgaggattccgtgaaaggccgtttcaccattagcaaagacaacaccaagaataccgtctatctccagctgaattcgctgaaaccggaagatacagcggtgtactattgcgcagctcgcaacaacatcttaccggtgactaccatcgacaaatacgagtattggggtcaaggcacccaggttactgttgggcttgaagtgctgtttcagggcccatccctcgagcaccaccaccaccaccacaagccggaggacaccgcagtatattattgcaatgtcaacgtggggtttgaatattggggccaggggactcaggtgacggtgagctctggcagcattgtcatcatcactgtggtagcagccgcagtcataatgggcactgcaggcctcagcacgtacctctataaccgccagcggaagatcaagaaatacagactacaacaggcccaaaaagggacccccatgaaaccgaacacacaagccacgcctcccggaggatcctacccatacgacgtaccagattacgcttagaagctttaacagcttatcgataatcaacctctggattacaaaatttgtgaaagattgactggtattcttaactatgttgctccttttacgctatgtggatacgctgctttaatgcctttgtatcatgctattgcttcccgtatggctttcattttctcctccttgtataaatcctggttgctgtctctttatgaggagttgtggcccgttgtcaggcaacgtggcgtggtgtgcactgtgtttgctgacgcaacccccactggttggggcattgccaccacctgtcagctcctttccgggactttcgctttccccctccctattgccacggcggaactcatcgccgcctgccttgcccgctgctggacaggggctcggctgttgggcactgacaattccgtggtgttgtcggggaaatcatcgtcctttccttggctgctcgcctgtgttgccacctggattctgcgcgggacgtccttctgctacgtcccttcggccctcaatccagcggaccttccttcccgcggcctgctgccggctctgcggcctcttccgcgtcttcgccttcgccctcagacgagtcggatctccctttgggccgcctccccgcatcgataccgtcgactcgctgatcagcctcgactgtgccttctagttgccagccatctgttgtttgcccctcccccgtgccttccttgaccctggaaggtgccactcccactgtcctttcctaataaaatgaggaaattgcatcgcattgtctgagtaggtgtcattctattctggggggtggggtggggcaggacagcaagggggaggattgggaagacaatagcaggcatgctggggatgcggtgggctctatgggcaacccagctttcttgtacaaagtggtgatccaaccggcaagttaacaacaacaattgatctgcgatcgctccggtgcccgtcagtgggcagagcgcacatcgcccacagtccccgagaagttggggggaggggtcggcaattgaacgggtgcctagagaaggtggcgcggggtaaactgggaaagtgatgtcgtgtactggctccgcctttttcccgagggtgggggagaaccgtatataagtgcagtagtcgccgtgaacgttctttttcgcaacgggtttgccgccagaacacagctgaagcttcgaggggctcgcatctctccttcacgcgcccgccgccctacctgaggccgccatccacgccggttgagtcgcgttctgccgcctcccgcctgtggtgcctcctgaactgcgtccgccgtctaggtaagtttaaagctcaggtcgagaccgggcctttgtccggcgctcccttggagcctacctagactcagccggctctccacgctttgcctgaccctgcttgctcaactctacgtctttgtttcgttttctgttctgcgccgttacagatccaagctgtgaccggcgcctactctagagccgccatgtctagactggacaagagcaaagtcataaactctgctctggaattactcaatggagtcggtatcgaaggcctgacgacaaggaaactcgctcaaaagctgggagttgagcagcctaccctgtactggcacgtgaagaacaagcgggccctgctcgatgccctgccaatcgagatgctggacaggcatcatacccactcctgccccctggaaggcgagtcatggcaagactttctgcggaacaacgccaagtcataccgctgtgctctcctctcacatcgcgacggggctaaagtgcatctcggcacccgcccaacagagaaacagtacgaaaccctggaaaatcagctcgcgttcctgtgtcagcaaggcttctccctggagaacgcactgtacgctctgtccgccgtgggccactttacactgggctgcgtattggaggaacaggagcatcaagtagcaaaagaggaaagagagacacctaccaccgattctatgcccccacttctgaaacaagcaattgagctgttcgaccggcagggagccgaacctgccttccttttcggcctggaactaatcatatgtggcctggagaaacagctaaagtgcgaaagcggcgggccgaccgacgcccttgacgattttgacttagacatgctcccagccgatgcccttgacgactttgaccttgatatgctgcctgctgacgctcttgacgattttgaccttgacatgctccccggggagggcagaggagccactaacttctccctgttgaaacaagcaggggatgtcgaagagaatcccgggccaatgaccgagtacaagcccacggtgcgcctcgccacccgcgacgacgtccccagggccgtacgcaccctcgccgccgcgttcgccgactaccccgccacgcgccacaccgtcgatccggaccgccacatcgagcgggtcaccgagctgcaagaactcttcctcacgcgcgtcgggctcgacatcggcaaggtgtgggtcgcggacgacggcgccgcggtggcggtctggaccacgccggagagcgtcgaagcgggggcggtgttcgccgagatcggcccgcgcatggccgagttgagcggttcccggctggccgcgcagcaacagatggaaggcctcctggcgccgcaccggcccaaggagcccgcgtggttcctggccaccgtcggcgtctcgcccgaccaccagggcaagggtctgggcagcgccgtcgtgctccccggagtggaggcggccgagcgcgccggggtgcccgccttcctggaaacctccgcgccccgcaacctccccttctacgagcggctcggcttcaccgtcaccgccgacgtcgaggtgcccgaaggaccgcgcacctggtgcatgacccgcaagcccggtgcctgaatctataacaagaaaatatatatataataagttatcacgtaagtagaacatgaaataacaatataattatcgtatgagttaaatcttaaaagtcacgtaaaagataatcatgcgtcattttgactcacgcggtcgttatagttcaaaatcagtgacacttaccgcattgacaagcacgcctcacgggagctccaagcggcgactgagatgtcctaaatgcacagcgacggattcgcgctatttagaaagagagagcaatatttcaagaatgcatgcgtcaattttacgcagactatctttctagggttaaaaaaagcttggcgtaatcatggtcatagctgtttcctgtgtgaaattgttatccgctcacaattccacacaacatacgagccggaagcataaagtgtaaagcctggggtgcctaatgagtgagctaactcacattaattgcgttgcgctcactgcccgctttccagtcgggaaacctgtcgtgccagctgcattaatgaatcggccaacgcgcggggagaggcggtttgcgtattgggcgctcttccgcttcctcgctcactgactcgctgcgctcggtcgttcggctgcggcgagcggtatcagctcactcaaaggcggtaatacggttatccacagaatcaggggataacgcaggaaagaacatgtgagcaaaaggccagcaaaaggccaggaaccgtaaaaaggccgcgttgctggcgtttttccataggctccgcccccctgacgagcatcacaaaaatcgacgctcaagtcagaggtggcgaaacccgacaggactataaagataccaggcgtttccccctggaagctccctcgtgcgctctcctgttccgaccctgccgcttaccggatacctgtccgcctttctcccttcgggaagcgtggcgctttctcatagctcacgctgtaggtatctcagttcggtgtaggtcgttcgctccaagctgggctgtgtgcacgaaccccccgttcagcccgaccgctgcgccttatccggtaactatcgtcttgagtccaacccggtaagacacgacttatcgccactggcagcagccactggtaacaggattagcagagcgaggtatgtaggcggtgctacagagttcttgaagtggtggcctaactacggctacactagaagaacagtatttggtatctgcgctctgctgaagccagttaccttcggaaaaagagttggtagctcttgatccggcaaacaaaccaccgctggtagcggtggtttttttgtttgcaagcagcagattacgcgcagaaaaaaaggatctcaagaagatcctttgatcttttctacggggtctgacgctcagtggaacgaaaactcacgttaagggattttggtcatgagattatcaaaaaggatcttcacctagatccttttaaattaaaaatgaagttttaaatcaatctaaagtatatatgagtaaacttggtctgacagttaccaatgcttaatcagtgaggcacctatctcagcgatctgtctatttcgttcatccatagttgcctgactccccgtcgtgtagataactacgatacgggagggcttaccatctggccccagtgctgcaatgataccgcgagacccacgctcaccggctccagatttatcagcaataaaccagccagccggaagggccgagcgcagaagtggtcctgcaactttatccgcctccatccagtctattaattgttgccgggaagctagagtaagtagttcgccagttaatagtttgcgcaacgttgttgccattgctacaggcatcgtggtgtcacgctcgtcgtttggtatggcttcattcagctccggttcccaacgatcaaggcgagttacatgatcccccatgttgtgcaaaaaagcggttagctccttcggtcctccgatcgttgtcagaagtaagttggccgcagtgttatcactcatggttatggcagcactgcataattctcttactgtcatgccatccgtaagatgcttttctgtgactggtgagtactcaaccaagtcattctgagaatagtgtatgcggcgaccgagttgctcttgcccggcgtcaatacgggataataccgcgccacatagcagaactttaaaagtgctcatcattggaaaacgttcttcggggcgaaaactctcaaggatcttaccgctgttgagatccagttcgatgtaacccactcgtgcacccaactgatcttcagcatcttttactttcaccagcgtttctgggtgagcaaaaacaggaaggcaaaatgccgcaaaaaagggaataagggcgacacggaaatgttgaatactcatactcttcctttttcaatattattgaagcatttatcagggttattgtctcatgagcggatacatatttgaatgtatttagaaaaataaacaaataggggttccgcgcacatttccccgaaaagtgccacctgacgtctaagaaaccattattatcatgacattaacctataaaaataggcgtatcacgaggccctttcg

SEQ ID NO: 51 - DNA, 8074 bp, synthetic construct
  source 1..8074: mol_type = other DNA
tctcgcgcgtttcggtgatgacggtgaaaacctctgacacatgcagctcccggagacggtcacagcttgtctgtaagcggatgccgggagcagacaagcccgtcagggcgcgtcagcgggtgttggcgggtgtcggggctggcttaactatgcggcatcagagcagattgtactgagagtgcaccatatgcggtgtgaaataccgcacagatgcgtaaggagaaaataccgcatcaggcgccattcgccattcaggctgcgcaactgttgggaagggcgatcggtgcgggcctcttcgctattacgccagctggcgaaagggggatgtgctgcaaggcgattaagttgggtaacgccagggttttcccagtcacgacgttgtaaaacgacggccagtgaattcaagctttattatttaaccctagaaagataatcatattgtgacgtacgttaaagataatcatgcgtaaaattgacgcatgtgttttatcggtctgtatatcgaggtttatttattaatttgaatagatattaagttttattatatttacacttacatactaataataaattcaacaaacaatttatttatgtttatttatttattaaaaaaaaacaaaaactcaaaatttcttctataaagtaacaaaacttttaaacattctctcttttacaaaaataaacttattttgtactttaaaaacagtcatgttgtaatcgataataagtaattagcttaacctatacataatagaaacaaattatacttattagtcagtcagaaacaactttggcacatatcaatattatgctctcgttaattaactcgagggatccggcgcgcctgtcattctaaatctctctttcagcctaaagctttttccccgtatccccccaggtgtctgcaggctcaaagagcagcgagaagcgttcagaggaaagcgatcccgtgccaccttccccgtgcccgggctgtccccgcacgctgccggctcggggatgcggggggagcgccggaccggagcggagccccgggcggctcgctgctgccccctagcgggggagggacgtaattacatccctgggggctttgggagggggctgtccccgtgagctcccaggcgcgcctgtcattctaaatctctctttcagcctaaagctttttccccgtatccccccaggtgtctgcaggctcaaagagcagcgagaagcgttcagaggaaagcgatcccgtgccaccttccccgtgcccgggctgtccccgcacgctgccggctcggggatgcggggggagcgccggaccggagcggagccccgggcggctcgctgctgccccctagcgggggagggacgtaattacatccctgggggctttgggggggggctgtccccgtgagctcccaggcgcgccgctagccaagaattcctcgagtttactccctatcagtgatagagaacgtatgaagagtttactccctatcagtgatagagaacgtatgcagactttactccctatcagtgatagagaacgtataaggagtttactccctatcagtgatagagaacgtatgaccagtttactccctatcagtgatagagaacgtatctacagtttactccctatcagtgatagagaacgtatatccagtttactccctatcagtgatagagaacgtataagctttaggcgtgtacggtgggcgcctataaaagcagagctcgtttagtgaaccgtcagatcgcctggagcaattccacaacacttttgtcttataccaactttccgtaccacttcctaccctcgtaaaccgcggtggcggccatcacaagtttgtacaaaaaagcaggcttggaaggagttcgaagccaccatgggcgcggcccagccggccatggctggatccatggcggatgtacagctggtcgagtcaggtggtcgctctgtacgtgctggtgactcgttacgcctgagttgccttgcgagcggtggcaccttcagcctctatgccatgggctggtttcgtcaggctcctggcaaagaacgcgagtttgtggcagcagtgacttggtctggtgggagcacgtactataccgattccgtcaaagggcgcttttcgatcagtcgggataatgccaagaacaccgtctatctgcagatgaactcgttgaaaccggaagatacggcggtttactactgtgcggttcgcacaagcggcttctttggctccattccggtgactgaacgtgccttcgactattggggccaaggaacgcaagttaccgtgtcaggcctggaagtgctgtttcagggaccaagcctcgagcaccaccaccaccaccacaagccggaggacaccgcagtatattattgcaatgtcaacgtggggtttgaatattggggccaggggactcaggtgacggtgagctctggcagcattgtcatcatcactgtggtagcagccgcagtcataatgggcactgcaggcctcagcacgtacctctataaccgccagcggaagatcaagaaatacagactacaacaggcccaaaaagggacccccatgaaaccgaacacacaagccacgcctcccggaggatcctacccatacgacgtaccagattacgcttagaagctttaacagcttatcgataatcaacctctggattacaaaatttgtgaaagattgactggtattcttaactatgttgctccttttacgctatgtggatacgctgctttaatgcctttgtatcatgctattgcttcccgtatggctttcattttctcctccttgtataaatcctggttgctgtctctttatgaggagttgtggcccgttgtcaggcaacgtggcgtggtgtgcactgtgtttgctgacgcaacccccactggttggggcattgccaccacctgtcagctcctttccgggactttcgctttccccctccctattgccacggcggaactcatcgccgcctgccttgcccgctgctggacaggggctcggctgttgggcactgacaattccgtggtgttgtcggggaaatcatcgtcctttccttggctgctcgcctgtgttgccacctggattctgcgcgggacgtccttctgctacgtcccttcggccctcaatccagcggaccttccttcccgcggcctgctgccggctctgcggcctcttccgcgtcttcgccttcgccctcagacgagtcggatctccctttgggccgcctccccgcatcgataccgtcgactcgctgatcagcctcgactgtgccttctagttgccagccatctgttgtttgcccctcccccgtgccttccttgaccctggaaggtgccactcccactgtcctttcctaataaaatgaggaaattgcatcgcattgtctgagtaggtgtcattctattctggggggtggggtggggcaggacagcaagggggaggattgggaagacaatagcaggcatgctggggatgcggtgggctctatgggcaacccagctttcttgtacaaagtggtgatccaaccggcaagttaacaacaacaattgatctgcgatcgctccggtgcccgtcagtgggcagagcgcacatcgcccacagtccccgagaagttggggggaggggtcggcaattgaacgggtgcctagagaaggtggcgcggggtaaactgggaaagtgatgtcgtgtactggctccgcctttttcccgagggtgggggagaaccgtatataagtgcagtagtcgccgtgaacgttctttttcgcaacgggtttgccgccagaacacagctgaagcttcgaggggctcgcatctctccttcacgcgcccgccgccctacctgaggccgccatccacgccggttgagtcgcgttctgccgcctcccgcctgtggtgcctcctgaactgcgtccgccgtctaggtaagtttaaagctcaggtcgagaccgggcctttgtccggcgctcccttggagcctacctagactcagccggctctccacgctttgcctgaccctgcttgctcaactctacgtctttgtttcgttttctgttctgcgccgttacagatccaagctgtgaccggcgcctactctagagccgccatgtctagactggacaagagcaaagtcataaactctgctctggaattactcaatggagtcggtatcgaaggcctgacgacaaggaaactcgctcaaaagctgggagttgagcagcctaccctgtactggcacgtgaagaacaagcgggccctgctcgatgccctgccaatcgagatgctggacaggcatcatacccactcctgccccctggaaggcgagtcatggcaagactttctgcggaacaacgccaagtcataccgctgtgctctcctctcacatcgcgacggggctaaagtgcatctcggcacccgcccaacagagaaacagtacgaaaccctggaaaatcagctcgcgttcctgtgtcagcaaggcttctccctggagaacgcactgtacgctctgtccgccgtgggccactttacactgggctgcgtattggaggaacaggagcatcaagtagcaaaagaggaaagagagacacctaccaccgattctatgcccccacttctgaaacaagcaattgagctgttcgaccggcagggagccgaacctgccttccttttcggcctggaactaatcatatgtggcctggagaaacagctaaagtgcgaaagcggcgggccgaccgacgcccttgacgattttgacttagacatgctcccagccgatgcccttgacgactttgaccttgatatgctgcctgctgacgctcttgacgattttgaccttgacatgctccccggggagggcagaggagccactaacttctccctgttgaaacaagcaggggatgtcgaagagaatcccgggccaatgaccgagtacaagcccacggtgcgcctcgccacccgcgacgacgtccccagggccgtacgcaccctcgccgccgcgttcgccgactaccccgccacgcgccacaccgtcgatccggaccgccacatcgagcgggtcaccgagctgcaagaactcttcctcacgcgcgtcgggctcgacatcggcaaggtgtgggtcgcggacgacggcgccgcggtggcggtctggaccacgccggagagcgtcgaagcgggggcggtgttcgccgagatcggcccgcgcatggccgagttgagcggttcccggctggccgcgcagcaacagatggaaggcctcctggcgccgcaccggcccaaggagcccgcgtggttcctggccaccgtcggcgtctcgcccgaccaccagggcaagggtctgggcagcgccgtcgtgctccccggagtggaggcggccgagcgcgccggggtgcccgccttcctggaaacctccgcgccccgcaacctccccttctacgagcggctcggcttcaccgtcaccgccgacgtcgaggtgcccgaaggaccgcgcacctggtgcatgacccgcaagcccggtgcctgaatctataacaagaaaatatatatataataagttatcacgtaagtagaacatgaaataacaatataattatcgtatgagttaaatcttaaaagtcacgtaaaagataatcatgcgtcattttgactcacgcggtcgttatagttcaaaatcagtgacacttaccgcattgacaagcacgcctcacgggagctccaagcggcgactgagatgtcctaaatgcacagcgacggattcgcgctatttagaaagagagagcaatatttcaagaatgcatgcgtcaattttacgcagactatctttctagggttaaaaaaagcttggcgtaatcatggtcatagctgtttcctgtgtgaaattgttatccgctcacaattccacacaacatacgagccggaagcataaagtgtaaagcctggggtgcctaatgagtgagctaactcacattaattgcgttgcgctcactgcccgctttccagtcgggaaacctgtcgtgccagctgcattaatgaatcggccaacgcgcggggagaggcggtttgcgtattgggcgctcttccgcttcctcgctcactgactcgctgcgctcggtcgttcggctgcggcgagcggtatcagctcactcaaaggcggtaatacggttatccacagaatcaggggataacgcaggaaagaacatgtgagcaaaaggccagcaaaaggccaggaaccgtaaaaaggccgcgttgctggcgtttttccataggctccgcccccctgacgagcatcacaaaaatcgacgctcaagtcagaggtggcgaaacccgacaggactataaagataccaggcgtttccccctggaagctccctcgtgcgctctcctgttccgaccctgccgcttaccggatacctgtccgcctttctcccttcgggaagcgtggcgctttctcatagctcacgctgtaggtatctcagttcggtgtaggtcgttcgctccaagctgggctgtgtgcacgaaccccccgttcagcccgaccgctgcgccttatccggtaactatcgtcttgagtccaacccggtaagacacgacttatcgccactggcagcagccactggtaacaggattagcagagcgaggtatgtaggcggtgctacagagttcttgaagtggtggcctaactacggctacactagaagaacagtatttggtatctgcgctctgctgaagccagttaccttcggaaaaagagttggtagctcttgatccggcaaacaaaccaccgctggtagcggtggtttttttgtttgcaagcagcagattacgcgcagaaaaaaaggatctcaagaagatcctttgatcttttctacggggtctgacgctcagtggaacgaaaactcacgttaagggattttggtcatgagattatcaaaaaggatcttcacctagatccttttaaattaaaaatgaagttttaaatcaatctaaagtatatatgagtaaacttggtctgacagttaccaatgcttaatcagtgaggcacctatctcagcgatctgtctatttcgttcatccatagttgcctgactccccgtcgtgtagataactacgatacgggagggcttaccatctggccccagtgctgcaatgataccgcgagacccacgctcaccggctccagatttatcagcaataaaccagccagccggaagggccgagcgcagaagtggtcctgcaactttatccgcctccatccagtctattaattgttgccgggaagctagagtaagtagttcgccagttaatagtttgcgcaacgttgttgccattgctacaggcatcgtggtgtcacgctcgtcgtttggtatggcttcattcagctccggttcccaacgatcaaggcgagttacatgatcccccatgttgtgcaaaaaagcggttagctccttcggtcctccgatcgttgtcagaagtaagttggccgcagtgttatcactcatggttatggcagcactgcataattctcttactgtcatgccatccgtaagatgcttttctgtgactggtgagtactcaaccaagtcattctgagaatagtgtatgcggcgaccgagttgctcttgcccggcgtcaatacgggataataccgcgccacatagcagaactttaaaagtgctcatcattggaaaacgttcttcggggcgaaaactctcaaggatcttaccgctgttgagatccagttcgatgtaacccactcgtgcacccaactgatcttcagcatcttttactttcaccagcgtttctgggtgagcaaaaacaggaaggcaaaatgccgcaaaaaagggaataagggcgacacggaaatgttgaatactcatactcttcctttttcaatattattgaagcatttatcagggttattgtctcatgagcggatacatatttgaatgtatttagaaaaataaacaaataggggttccgcgcacatttccccgaaaagtgccacctgacgtctaagaaaccattattatcatgacattaacctataaaaataggcgtatcacgaggccctttcg

SEQ ID NO: 52 - DNA, 8074 bp, synthetic construct
  source 1..8074: mol_type = other DNA
tctcgcgcgtttcggtgatgacggtgaaaacctctgacacatgcagctcccggagacggtcacagcttgtctgtaagcggatgccgggagcagacaagcccgtcagggcgcgtcagcgggtgttggcgggtgtcggggctggcttaactatgcggcatcagagcagattgtactgagagtgcaccatatgcggtgtgaaataccgcacagatgcgtaaggagaaaataccgcatcaggcgccattcgccattcaggctgcgcaactgttgggaagggcgatcggtgcgggcctcttcgctattacgccagctggcgaaagggggatgtgctgcaaggcgattaagttgggtaacgccagggttttcccagtcacgacgttgtaaaacgacggccagtgaattcaagctttattatttaaccctagaaagataatcatattgtgacgtacgttaaagataatcatgcgtaaaattgacgcatgtgttttatcggtctgtatatcgaggtttatttattaatttgaatagatattaagttttattatatttacacttacatactaataataaattcaacaaacaatttatttatgtttatttatttattaaaaaaaaacaaaaactcaaaatttcttctataaagtaacaaaacttttaaacattctctcttttacaaaaataaacttattttgtactttaaaaacagtcatgttgtaatcgataataagtaattagcttaacctatacataatagaaacaaattatacttattagtcagtcagaaacaactttggcacatatcaatattatgctctcgttaattaactcgagggatccggcgcgcctgtcattctaaatctctctttcagcctaaagctttttccccgtatccccccaggtgtctgcaggctcaaagagcagcgagaagcgttcagaggaaagcgatcccgtgccaccttccccgtgcccgggctgtccccgcacgctgccggctcggggatgcggggggagcgccggaccggagcggagccccgggcggctcgctgctgccccctagcgggggagggacgtaattacatccctgggggctttgggagggggctgtccccgtgagctcccaggcgcgcctgtcattctaaatctctctttcagcctaaagctttttccccgtatccccccaggtgtctgcaggctcaaagagcagcgagaagcgttcagaggaaagcgatcccgtgccaccttccccgtgcccgggctgtccccgcacgctgccggctcggggatgcggggggagcgccggaccggagcggagccccgggcggctcgctgctgccccctagcgggggagggacgtaattacatccctgggggctttgggggggggctgtccccgtgagctcccaggcgcgccgctagccaagaattcctcgagtttactccctatcagtgatagagaacgtatgaagagtttactccctatcagtgatagagaacgtatgcagactttactccctatcagtgatagagaacgtataaggagtttactccctatcagtgatagagaacgtatgaccagtttactccctatcagtgatagagaacgtatctacagtttactccctatcagtgatagagaacgtatatccagtttactccctatcagtgatagagaacgtataagctttaggcgtgtacggtgggcgcctataaaagcagagctcgtttagtgaaccgtcagatcgcctggagcaattccacaacacttttgtcttataccaactttccgtaccacttcctaccctcgtaaaccgcggtggcggccatcacaagtttgtacaaaaaagcaggcttggaaggagttcgaagccaccatgggcgcggcccagccggccatggctggatccatggccgatgtgcagctggtggaatcgggtggaggcttagttcaggcaggaggctcgttgcgcctgtcctgtgcagcgagtggtcgtaccatctccatggcagcgatgagctggtttcgccaagctccaggcaaagaacgcgagtttgtcgctggcatcagtcgttctgctggttcggccgttcatgccgatagcgtcaaaggtcgcttcacgattagccgcgacaacacgaagaataccctgtatctccagatgaacagcctgaaagccgaagataccgcggtgtactactgcgcggtacggacttcaggcttctttgggagcattccgcgtacaggcactgcgttcgactattggggtcaagggacccaggtaacggtttcaggccttgaggtgctgtttcagggtccgtctctcgagcaccaccaccaccaccacaagccggaggacaccgcagtatattattgcaatgtcaacgtggggtttgaatattggggccaggggactcaggtgacggtgagctctggcagcattgtcatcatcactgtggtagcagccgcagtcataatgggcactgcaggcctcagcacgtacctctataaccgccagcggaagatcaagaaatacagactacaacaggcccaaaaagggacccccatgaaaccgaacacacaagccacgcctcccggaggatcctacccatacgacgtaccagattacgcttagaagctttaacagcttatcgataatcaacctctggattacaaaatttgtgaaagattgactggtattcttaactatgttgctccttttacgctatgtggatacgctgctttaatgcctttgtatcatgctattgcttcccgtatggctttcattttctcctccttgtataaatcctggttgctgtctctttatgaggagttgtggcccgttgtcaggcaacgtggcgtggtgtgcactgtgtttgctgacgcaacccccactggttggggcattgccaccacctgtcagctcctttccgggactttcgctttccccctccctattgccacggcggaactcatcgccgcctgccttgcccgctgctggacaggggctcggctgttgggcactgacaattccgtggtgttgtcggggaaatcatcgtcctttccttggctgctcgcctgtgttgccacctggattctgcgcgggacgtccttctgctacgtcccttcggccctcaatccagcggaccttccttcccgcggcctgctgccggctctgcggcctcttccgcgtcttcgccttcgccctcagacgagtcggatctccctttgggccgcctccccgcatcgataccgtcgactcgctgatcagcctcgactgtgccttctagttgccagccatctgttgtttgcccctcccccgtgccttccttgaccctggaaggtgccactcccactgtcctttcctaataaaatgaggaaattgcatcgcattgtctgagtaggtgtcattctattctggggggtggggtggggcaggacagcaagggggaggattgggaagacaatagcaggcatgctggggatgcggtgggctctatgggcaacccagctttcttgtacaaagtggtgatccaaccggcaagttaacaacaacaattgatctgcgatcgctccggtgcccgtcagtgggcagagcgcacatcgcccacagtccccgagaagttggggggaggggtcggcaattgaacgggtgcctagagaaggtggcgcggggtaaactgggaaagtgatgtcgtgtactggctccgcctttttcccgagggtgggggagaaccgtatataagtgcagtagtcgccgtgaacgttctttttcgcaacgggtttgccgccagaacacagctgaagcttcgaggggctcgcatctctccttcacgcgcccgccgccctacctgaggccgccatccacgccggttgagtcgcgttctgccgcctcccgcctgtggtgcctcctgaactgcgtccgccgtctaggtaagtttaaagctcaggtcgagaccgggcctttgtccggcgctcccttggagcctacctagactcagccggctctccacgctttgcctgaccctgcttgctcaactctacgtctttgtttcgttttctgttctgcgccgttacagatccaagctgtgaccggcgcctactctagagccgccatgtctagactggacaagagcaaagtcataaactctgctctggaattactcaatggagtcggtatcgaaggcctgacgacaaggaaactcgctcaaaagctgggagttgagcagcctaccctgtactggcacgtgaagaacaagcgggccctgctcgatgccctgccaatcgagatgctggacaggcatcatacccactcctgccccctggaaggcgagtcatggcaagactttctgcggaacaacgccaagtcataccgctgtgctctcctctcacatcgcgacggggctaaagtgcatctcggcacccgcccaacagagaaacagtacgaaaccctggaaaatcagctcgcgttcctgtgtcagcaaggcttctccctggagaacgcactgtacgctctgtccgccgtgggccactttacactgggctgcgtattggaggaacaggagcatcaagtagcaaaagaggaaagagagacacctaccaccgattctatgcccccacttctgaaacaagcaattgagctgttcgaccggcagggagccgaacctgccttccttttcggcctggaactaatcatatgtggcctggagaaacagctaaagtgcgaaagcggcgggccgaccgacgcccttgacgattttgacttagacatgctcccagccgatgcccttgacgactttgaccttgatatgctgcctgctgacgctcttgacgattttgaccttgacatgctccccggggagggcagaggagccactaacttctccctgttgaaacaagcaggggatgtcgaagagaatcccgggccaatgaccgagtacaagcccacggtgcgcctcgccacccgcgacgacgtccccagggccgtacgcaccctcgccgccgcgttcgccgactaccccgccacgcgccacaccgtcgatccggaccgccacatcgagcgggtcaccgagctgcaagaactcttcctcacgcgcgtcgggctcgacatcggcaaggtgtgggtcgcggacgacggcgccgcggtggcggtctggaccacgccggagagcgtcgaagcgggggcggtgttcgccgagatcggcccgcgcatggccgagttgagcggttcccggctggccgcgcagcaacagatggaaggcctcctggcgccgcaccggcccaaggagcccgcgtggttcctggccaccgtcggcgtctcgcccgaccaccagggcaagggtctgggcagcgccgtcgtgctccccggagtggaggcggccgagcgcgccggggtgcccgccttcctggaaacctccgcgccccgcaacctccccttctacgagcggctcggcttcaccgtcaccgccgacgtcgaggtgcccgaaggaccgcgcacctggtgcatgacccgcaagcccggtgcctgaatctataacaagaaaatatatatataataagttatcacgtaagtagaacatgaaataacaatataattatcgtatgagttaaatcttaaaagtcacgtaaaagataatcatgcgtcattttgactcacgcggtcgttatagttcaaaatcagtgacacttaccgcattgacaagcacgcctcacgggagctccaagcggcgactgagatgtcctaaatgcacagcgacggattcgcgctatttagaaagagagagcaatatttcaagaatgcatgcgtcaattttacgcagactatctttctagggttaaaaaaagcttggcgtaatcatggtcatagctgtttcctgtgtgaaattgttatccgctcacaattccacacaacatacgagccggaagcataaagtgtaaagcctggggtgcctaatgagtgagctaactcacattaattgcgttgcgctcactgcccgctttccagtcgggaaacctgtcgtgccagctgcattaatgaatcggccaacgcgcggggagaggcggtttgcgtattgggcgctcttccgcttcctcgctcactgactcgctgcgctcggtcgttcggctgcggcgagcggtatcagctcactcaaaggcggtaatacggttatccacagaatcaggggataacgcaggaaagaacatgtgagcaaaaggccagcaaaaggccaggaaccgtaaaaaggccgcgttgctggcgtttttccataggctccgcccccctgacgagcatcacaaaaatcgacgctcaagtcagaggtggcgaaacccgacaggactataaagataccaggcgtttccccctggaagctccctcgtgcgctctcctgttccgaccctgccgcttaccggatacctgtccgcctttctcccttcgggaagcgtggcgctttctcatagctcacgctgtaggtatctcagttcggtgtaggtcgttcgctccaagctgggctgtgtgcacgaaccccccgttcagcccgaccgctgcgccttatccggtaactatcgtcttgagtccaacccggtaagacacgacttatcgccactggcagcagccactggtaacaggattagcagagcgaggtatgtaggcggtgctacagagttcttgaagtggtggcctaactacggctacactagaagaacagtatttggtatctgcgctctgctgaagccagttaccttcggaaaaagagttggtagctcttgatccggcaaacaaaccaccgctggtagcggtggtttttttgtttgcaagcagcagattacgcgcagaaaaaaaggatctcaagaagatcctttgatcttttctacggggtctgacgctcagtggaacgaaaactcacgttaagggattttggtcatgagattatcaaaaaggatcttcacctagatccttttaaattaaaaatgaagttttaaatcaatctaaagtatatatgagtaaacttggtctgacagttaccaatgcttaatcagtgaggcacctatctcagcgatctgtctatttcgttcatccatagttgcctgactccccgtcgtgtagataactacgatacgggagggcttaccatctggccccagtgctgcaatgataccgcgagacccacgctcaccggctccagatttatcagcaataaaccagccagccggaagggccgagcgcagaagtggtcctgcaactttatccgcctccatccagtctattaattgttgccgggaagctagagtaagtagttcgccagttaatagtttgcgcaacgttgttgccattgctacaggcatcgtggtgtcacgctcgtcgtttggtatggcttcattcagctccggttcccaacgatcaaggcgagttacatgatcccccatgttgtgcaaaaaagcggttagctccttcggtcctccgatcgttgtcagaagtaagttggccgcagtgttatcactcatggttatggcagcactgcataattctcttactgtcatgccatccgtaagatgcttttctgtgactggtgagtactcaaccaagtcattctgagaatagtgtatgcggcgaccgagttgctcttgcccggcgtcaatacgggataataccgcgccacatagcagaactttaaaagtgctcatcattggaaaacgttcttcggggcgaaaactctcaaggatcttaccgctgttgagatccagttcgatgtaacccactcgtgcacccaactgatcttcagcatcttttactttcaccagcgtttctgggtgagcaaaaacaggaaggcaaaatgccgcaaaaaagggaataagggcgacacggaaatgttgaatactcatactcttcctttttcaatattattgaagcatttatcagggttattgtctcatgagcggatacatatttgaatgtatttagaaaaataaacaaataggggttccgcgcacatttccccgaaaagtgccacctgacgtctaagaaaccattattatcatgacattaacctataaaaataggcgtatcacgaggccctttcg

SEQ ID NO: 53 - DNA, 8074 bp, synthetic construct
  source 1..8074: mol_type = other DNA
tctcgcgcgtttcggtgatgacggtgaaaacctctgacacatgcagctcccggagacggtcacagcttgtctgtaagcggatgccgggagcagacaagcccgtcagggcgcgtcagcgggtgttggcgggtgtcggggctggcttaactatgcggcatcagagcagattgtactgagagtgcaccatatgcggtgtgaaataccgcacagatgcgtaaggagaaaataccgcatcaggcgccattcgccattcaggctgcgcaactgttgggaagggcgatcggtgcgggcctcttcgctattacgccagctggcgaaagggggatgtgctgcaaggcgattaagttgggtaacgccagggttttcccagtcacgacgttgtaaaacgacggccagtgaattcaagctttattatttaaccctagaaagataatcatattgtgacgtacgttaaagataatcatgcgtaaaattgacgcatgtgttttatcggtctgtatatcgaggtttatttattaatttgaatagatattaagttttattatatttacacttacatactaataataaattcaacaaacaatttatttatgtttatttatttattaaaaaaaaacaaaaactcaaaatttcttctataaagtaacaaaacttttaaacattctctcttttacaaaaataaacttattttgtactttaaaaacagtcatgttgtaatcgataataagtaattagcttaacctatacataatagaaacaaattatacttattagtcagtcagaaacaactttggcacatatcaatattatgctctcgttaattaactcgagggatccggcgcgcctgtcattctaaatctctctttcagcctaaagctttttccccgtatccccccaggtgtctgcaggctcaaagagcagcgagaagcgttcagaggaaagcgatcccgtgccaccttccccgtgcccgggctgtccccgcacgctgccggctcggggatgcggggggagcgccggaccggagcggagccccgggcggctcgctgctgccccctagcgggggagggacgtaattacatccctgggggctttgggagggggctgtccccgtgagctcccaggcgcgcctgtcattctaaatctctctttcagcctaaagctttttccccgtatccccccaggtgtctgcaggctcaaagagcagcgagaagcgttcagaggaaagcgatcccgtgccaccttccccgtgcccgggctgtccccgcacgctgccggctcggggatgcggggggagcgccggaccggagcggagccccgggcggctcgctgctgccccctagcgggggagggacgtaattacatccctgggggctttgggggggggctgtccccgtgagctcccaggcgcgccgctagccaagaattcctcgagtttactccctatcagtgatagagaacgtatgaagagtttactccctatcagtgatagagaacgtatgcagactttactccctatcagtgatagagaacgtataaggagtttactccctatcagtgatagagaacgtatgaccagtttactccctatcagtgatagagaacgtatctacagtttactccctatcagtgatagagaacgtatatccagtttactccctatcagtgatagagaacgtataagctttaggcgtgtacggtgggcgcctataaaagcagagctcgtttagtgaaccgtcagatcgcctggagcaattccacaacacttttgtcttataccaactttccgtaccacttcctaccctcgtaaaccgcggtggcggccatcacaagtttgtacaaaaaagcaggcttggaaggagttcgaagccaccatgggcgcggcccagccggccatggctggatccatggcgcaagtgcagcttgtcgagtcaggcggaggtttagtccagactggcggttcgctgaaactctcttgtaccgcctctgtacgcactctgtcctactatcacgttggctggtttcgccaagcaccagggaaagaacgcgagtttgtcgcaggcattcatcggagcggtgaaagcacgttctatgcggatagcgtgaaaggccgcttcacgatcagtcgcgataacgccaagaataccgtgcatctgcagatgaactcgctgaaaccggaagataccgcggtgtactattgcgctcagcgtgttcgtggcttctttggccctttgcgtagcacaccgagttggtacgactattggggacaaggtacccaggttacggtatcagggctggaagtgctgtttcagggtccgtccctcgagcaccaccaccaccaccacaagccggaggacaccgcagtatattattgcaatgtcaacgtggggtttgaatattggggccaggggactcaggtgacggtgagctctggcagcattgtcatcatcactgtggtagcagccgcagtcataatgggcactgcaggcctcagcacgtacctctataaccgccagcggaagatcaagaaatacagactacaacaggcccaaaaagggacccccatgaaaccgaacacacaagccacgcctcccggaggatcctacccatacgacgtaccagattacgcttagaagctttaacagcttatcgataatcaacctctggattacaaaatttgtgaaagattgactggtattcttaactatgttgctccttttacgctatgtggatacgctgctttaatgcctttgtatcatgctattgcttcccgtatggctttcattttctcctccttgtataaatcctggttgctgtctctttatgaggagttgtggcccgttgtcaggcaacgtggcgtggtgtgcactgtgtttgctgacgcaacccccactggttggggcattgccaccacctgtcagctcctttccgggactttcgctttccccctccctattgccacggcggaactcatcgccgcctgccttgcccgctgctggacaggggctcggctgttgggcactgacaattccgtggtgttgtcggggaaatcatcgtcctttccttggctgctcgcctgtgttgccacctggattctgcgcgggacgtccttctgctacgtcccttcggccctcaatccagcggaccttccttcccgcggcctgctgccggctctgcggcctcttccgcgtcttcgccttcgccctcagacgagtcggatctccctttgggccgcctccccgcatcgataccgtcgactcgctgatcagcctcgactgtgccttctagttgccagccatctgttgtttgcccctcccccgtgccttccttgaccctggaaggtgccactcccactgtcctttcctaataaaatgaggaaattgcatcgcattgtctgagtaggtgtcattctattctggggggtggggtggggcaggacagcaagggggaggattgggaagacaatagcaggcatgctggggatgcggtgggctctatgggcaacccagctttcttgtacaaagtggtgatccaaccggcaagttaacaacaacaattgatctgcgatcgctccggtgcccgtcagtgggcagagcgcacatcgcccacagtccccgagaagttggggggaggggtcggcaattgaacgggtgcctagagaaggtggcgcggggtaaactgggaaagtgatgtcgtgtactggctccgcctttttcccgagggtgggggagaaccgtatataagtgcagtagtcgccgtgaacgttctttttcgcaacgggtttgccgccagaacacagctgaagcttcgaggggctcgcatctctccttcacgcgcccgccgccctacctgaggccgccatccacgccggttgagtcgcgttctgccgcctcccgcctgtggtgcctcctgaactgcgtccgccgtctaggtaagtttaaagctcaggtcgagaccgggcctttgtccggcgctcccttggagcctacctagactcagccggctctccacgctttgcctgaccctgcttgctcaactctacgtctttgtttcgttttctgttctgcgccgttacagatccaagctgtgaccggcgcctactctagagccgccatgtctagactggacaagagcaaagtcataaactctgctctggaattactcaatggagtcggtatcgaaggcctgacgacaaggaaactcgctcaaaagctgggagttgagcagcctaccctgtactggcacgtgaagaacaagcgggccctgctcgatgccctgccaatcgagatgctggacaggcatcatacccactcctgccccctggaaggcgagtcatggcaagactttctgcggaacaacgccaagtcataccgctgtgctctcctctcacatcgcgacggggctaaagtgcatctcggcacccgcccaacagagaaacagtacgaaaccctggaaaatcagctcgcgttcctgtgtcagcaaggcttctccctggagaacgcactgtacgctctgtccgccgtgggccactttacactgggctgcgtattggaggaacaggagcatcaagtagcaaaagaggaaagagagacacctaccaccgattctatgcccccacttctgaaacaagcaattgagctgttcgaccggcagggagccgaacctgccttccttttcggcctggaactaatcatatgtggcctggagaaacagctaaagtgcgaaagcggcgggccgaccgacgcccttgacgattttgacttagacatgctcccagccgatgcccttgacgactttgaccttgatatgctgcctgctgacgctcttgacgattttgaccttgacatgctccccggggagggcagaggagccactaacttctccctgttgaaacaagcaggggatgtcgaagagaatcccgggccaatgaccgagtacaagcccacggtgcgcctcgccacccgcgacgacgtccccagggccgtacgcaccctcgccgccgcgttcgccgactaccccgccacgcgccacaccgtcgatccggaccgccacatcgagcgggtcaccgagctgcaagaactcttcctcacgcgcgtcgggctcgacatcggcaaggtgtgggtcgcggacgacggcgccgcggtggcggtctggaccacgccggagagcgtcgaagcgggggcggtgttcgccgagatcggcccgcgcatggccgagttgagcggttcccggctggccgcgcagcaacagatggaaggcctcctggcgccgcaccggcccaaggagcccgcgtggttcctggccaccgtcggcgtctcgcccgaccaccagggcaagggtctgggcagcgccgtcgtgctccccggagtggaggcggccgagcgcgccggggtgcccgccttcctggaaacctccgcgccccgcaacctccccttctacgagcggctcggcttcaccgtcaccgccgacgtcgaggtgcccgaaggaccgcgcacctggtgcatgacccgcaagcccggtgcctgaatctataacaagaaaatatatatataataagttatcacgtaagtagaacatgaaataacaatataattatcgtatgagttaaatcttaaaagtcacgtaaaagataatcatgcgtcattttgactcacgcggtcgttatagttcaaaatcagtgacacttaccgcattgacaagcacgcctcacgggagctccaagcggcgactgagatgtcctaaatgcacagcgacggattcgcgctatttagaaagagagagcaatatttcaagaatgcatgcgtcaattttacgcagactatctttctagggttaaaaaaagcttggcgtaatcatggtcatagctgtttcctgtgtgaaattgttatccgctcacaattccacacaacatacgagccggaagcataaagtgtaaagcctggggtgcctaatgagtgagctaactcacattaattgcgttgcgctcactgcccgctttccagtcgggaaacctgtcgtgccagctgcattaatgaatcggccaacgcgcggggagaggcggtttgcgtattgggcgctcttccgcttcctcgctcactgactcgctgcgctcggtcgttcggctgcggcgagcggtatcagctcactcaaaggcggtaatacggttatccacagaatcaggggataacgcaggaaagaacatgtgagcaaaaggccagcaaaaggccaggaaccgtaaaaaggccgcgttgctggcgtttttccataggctccgcccccctgacgagcatcacaaaaatcgacgctcaagtcagaggtggcgaaacccgacaggactataaagataccaggcgtttccccctggaagctccctcgtgcgctctcctgttccgaccctgccgcttaccggatacctgtccgcctttctcccttcgggaagcgtggcgctttctcatagctcacgctgtaggtatctcagttcggtgtaggtcgttcgctccaagctgggctgtgtgcacgaaccccccgttcagcccgaccgctgcgccttatccggtaactatcgtcttgagtccaacccggtaagacacgacttatcgccactggcagcagccactggtaacaggattagcagagcgaggtatgtaggcggtgctacagagttcttgaagtggtggcctaactacggctacactagaagaacagtatttggtatctgcgctctgctgaagccagttaccttcggaaaaagagttggtagctcttgatccggcaaacaaaccaccgctggtagcggtggtttttttgtttgcaagcagcagattacgcgcagaaaaaaaggatctcaagaagatcctttgatcttttctacggggtctgacgctcagtggaacgaaaactcacgttaagggattttggtcatgagattatcaaaaaggatcttcacctagatccttttaaattaaaaatgaagttttaaatcaatctaaagtatatatgagtaaacttggtctgacagttaccaatgcttaatcagtgaggcacctatctcagcgatctgtctatttcgttcatccatagttgcctgactccccgtcgtgtagataactacgatacgggagggcttaccatctggccccagtgctgcaatgataccgcgagacccacgctcaccggctccagatttatcagcaataaaccagccagccggaagggccgagcgcagaagtggtcctgcaactttatccgcctccatccagtctattaattgttgccgggaagctagagtaagtagttcgccagttaatagtttgcgcaacgttgttgccattgctacaggcatcgtggtgtcacgctcgtcgtttggtatggcttcattcagctccggttcccaacgatcaaggcgagttacatgatcccccatgttgtgcaaaaaagcggttagctccttcggtcctccgatcgttgtcagaagtaagttggccgcagtgttatcactcatggttatggcagcactgcataattctcttactgtcatgccatccgtaagatgcttttctgtgactggtgagtactcaaccaagtcattctgagaatagtgtatgcggcgaccgagttgctcttgcccggcgtcaatacgggataataccgcgccacatagcagaactttaaaagtgctcatcattggaaaacgttcttcggggcgaaaactctcaaggatcttaccgctgttgagatccagttcgatgtaacccactcgtgcacccaactgatcttcagcatcttttactttcaccagcgtttctgggtgagcaaaaacaggaaggcaaaatgccgcaaaaaagggaataagggcgacacggaaatgttgaatactcatactcttcctttttcaatattattgaagcatttatcagggttattgtctcatgagcggatacatatttgaatgtatttagaaaaataaacaaataggggttccgcgcacatttccccgaaaagtgccacctgacgtctaagaaaccattattatcatgacattaacctataaaaataggcgtatcacgaggccctttcg

SEQ ID NO: 54 - DNA, 8065 bp, synthetic construct
  source 1..8065: mol_type = other DNA
tctcgcgcgtttcggtgatgacggtgaaaacctctgacacatgcagctcccggagacggtcacagcttgtctgtaagcggatgccgggagcagacaagcccgtcagggcgcgtcagcgggtgttggcgggtgtcggggctggcttaactatgcggcatcagagcagattgtactgagagtgcaccatatgcggtgtgaaataccgcacagatgcgtaaggagaaaataccgcatcaggcgccattcgccattcaggctgcgcaactgttgggaagggcgatcggtgcgggcctcttcgctattacgccagctggcgaaagggggatgtgctgcaaggcgattaagttgggtaacgccagggttttcccagtcacgacgttgtaaaacgacggccagtgaattcaagctttattatttaaccctagaaagataatcatattgtgacgtacgttaaagataatcatgcgtaaaattgacgcatgtgttttatcggtctgtatatcgaggtttatttattaatttgaatagatattaagttttattatatttacacttacatactaataataaattcaacaaacaatttatttatgtttatttatttattaaaaaaaaacaaaaactcaaaatttcttctataaagtaacaaaacttttaaacattctctcttttacaaaaataaacttattttgtactttaaaaacagtcatgttgtaatcgataataagtaattagcttaacctatacataatagaaacaaattatacttattagtcagtcagaaacaactttggcacatatcaatattatgctctcgttaattaactcgagggatccggcgcgcctgtcattctaaatctctctttcagcctaaagctttttccccgtatccccccaggtgtctgcaggctcaaagagcagcgagaagcgttcagaggaaagcgatcccgtgccaccttccccgtgcccgggctgtccccgcacgctgccggctcggggatgcggggggagcgccggaccggagcggagccccgggcggctcgctgctgccccctagcgggggagggacgtaattacatccctgggggctttgggagggggctgtccccgtgagctcccaggcgcgcctgtcattctaaatctctctttcagcctaaagctttttccccgtatccccccaggtgtctgcaggctcaaagagcagcgagaagcgttcagaggaaagcgatcccgtgccaccttccccgtgcccgggctgtccccgcacgctgccggctcggggatgcggggggagcgccggaccggagcggagccccgggcggctcgctgctgccccctagcgggggagggacgtaattacatccctgggggctttgggggggggctgtccccgtgagctcccaggcgcgccgctagccaagaattcctcgagtttactccctatcagtgatagagaacgtatgaagagtttactccctatcagtgatagagaacgtatgcagactttactccctatcagtgatagagaacgtataaggagtttactccctatcagtgatagagaacgtatgaccagtttactccctatcagtgatagagaacgtatctacagtttactccctatcagtgatagagaacgtatatccagtttactccctatcagtgatagagaacgtataagctttaggcgtgtacggtgggcgcctataaaagcagagctcgtttagtgaaccgtcagatcgcctggagcaattccacaacacttttgtcttataccaactttccgtaccacttcctaccctcgtaaaccgcggtggcggccatcacaagtttgtacaaaaaagcaggcttggaaggagttcgaagccaccatgggcgcggcccagccggccatggctggatccatggcggatgttcagctggtagagtctggcggtggtctggtccaagctggaggcagtttacggctttcctgcactgccagtggcttgaccatttccacgtataacatcggttggtttcgccaagcaccaggcaaagaacgcgagtttgtgggcattatcattcgcaatggcgacacgacctattatgccgatagcgtcaaaggccgtttcaccatttcacgcgacaatgcgaagaataccgtgtatctgcagatgaactcggttaaaccggcggatgcggcagtgtacagctgtggtgccacagttcgtgctggtgcagcggccgaacagtacaacagctacatcttccgtggacaagggactcaggtgacggtagggctggaagtcctctttcagggtccgtcgctcgagcaccaccaccaccaccacaagccggaggacaccgcagtatattattgcaatgtcaacgtggggtttgaatattggggccaggggactcaggtgacggtgagctctggcagcattgtcatcatcactgtggtagcagccgcagtcataatgggcactgcaggcctcagcacgtacctctataaccgccagcggaagatcaagaaatacagactacaacaggcccaaaaagggacccccatgaaaccgaacacacaagccacgcctcccggaggatcctacccatacgacgtaccagattacgcttagaagctttaacagcttatcgataatcaacctctggattacaaaatttgtgaaagattgactggtattcttaactatgttgctccttttacgctatgtggatacgctgctttaatgcctttgtatcatgctattgcttcccgtatggctttcattttctcctccttgtataaatcctggttgctgtctctttatgaggagttgtggcccgttgtcaggcaacgtggcgtggtgtgcactgtgtttgctgacgcaacccccactggttggggcattgccaccacctgtcagctcctttccgggactttcgctttccccctccctattgccacggcggaactcatcgccgcctgccttgcccgctgctggacaggggctcggctgttgggcactgacaattccgtggtgttgtcggggaaatcatcgtcctttccttggctgctcgcctgtgttgccacctggattctgcgcgggacgtccttctgctacgtcccttcggccctcaatccagcggaccttccttcccgcggcctgctgccggctctgcggcctcttccgcgtcttcgccttcgccctcagacgagtcggatctccctttgggccgcctccccgcatcgataccgtcgactcgctgatcagcctcgactgtgccttctagttgccagccatctgttgtttgcccctcccccgtgccttccttgaccctggaaggtgccactcccactgtcctttcctaataaaatgaggaaattgcatcgcattgtctgagtaggtgtcattctattctggggggtggggtggggcaggacagcaagggggaggattgggaagacaatagcaggcatgctggggatgcggtgggctctatgggcaacccagctttcttgtacaaagtggtgatccaaccggcaagttaacaacaacaattgatctgcgatcgctccggtgcccgtcagtgggcagagcgcacatcgcccacagtccccgagaagttggggggaggggtcggcaattgaacgggtgcctagagaaggtggcgcggggtaaactgggaaagtgatgtcgtgtactggctccgcctttttcccgagggtgggggagaaccgtatataagtgcagtagtcgccgtgaacgttctttttcgcaacgggtttgccgccagaacacagctgaagcttcgaggggctcgcatctctccttcacgcgcccgccgccctacctgaggccgccatccacgccggttgagtcgcgttctgccgcctcccgcctgtggtgcctcctgaactgcgtccgccgtctaggtaagtttaaagctcaggtcgagaccgggcctttgtccggcgctcccttggagcctacctagactcagccggctctccacgctttgcctgaccctgcttgctcaactctacgtctttgtttcgttttctgttctgcgccgttacagatccaagctgtgaccggcgcctactctagagccgccatgtctagactggacaagagcaaagtcataaactctgctctggaattactcaatggagtcggtatcgaaggcctgacgacaaggaaactcgctcaaaagctgggagttgagcagcctaccctgtactggcacgtgaagaacaagcgggccctgctcgatgccctgccaatcgagatgctggacaggcatcatacccactcctgccccctggaaggcgagtcatggcaagactttctgcggaacaacgccaagtcataccgctgtgctctcctctcacatcgcgacggggctaaagtgcatctcggcacccgcccaacagagaaacagtacgaaaccctggaaaatcagctcgcgttcctgtgtcagcaaggcttctccctggagaacgcactgtacgctctgtccgccgtgggccactttacactgggctgcgtattggaggaacaggagcatcaagtagcaaaagaggaaagagagacacctaccaccgattctatgcccccacttctgaaacaagcaattgagctgttcgaccggcagggagccgaacctgccttccttttcggcctggaactaatcatatgtggcctggagaaacagctaaagtgcgaaagcggcgggccgaccgacgcccttgacgattttgacttagacatgctcccagccgatgcccttgacgactttgaccttgatatgctgcctgctgacgctcttgacgattttgaccttgacatgctccccggggagggcagaggagccactaacttctccctgttgaaacaagcaggggatgtcgaagagaatcccgggccaatgaccgagtacaagcccacggtgcgcctcgccacccgcgacgacgtccccagggccgtacgcaccctcgccgccgcgttcgccgactaccccgccacgcgccacaccgtcgatccggaccgccacatcgagcgggtcaccgagctgcaagaactcttcctcacgcgcgtcgggctcgacatcggcaaggtgtgggtcgcggacgacggcgccgcggtggcggtctggaccacgccggagagcgtcgaagcgggggcggtgttcgccgagatcggcccgcgcatggccgagttgagcggttcccggctggccgcgcagcaacagatggaaggcctcctggcgccgcaccggcccaaggagcccgcgtggttcctggccaccgtcggcgtctcgcccgaccaccagggcaagggtctgggcagcgccgtcgtgctccccggagtggaggcggccgagcgcgccggggtgcccgccttcctggaaacctccgcgccccgcaacctccccttctacgagcggctcggcttcaccgtcaccgccgacgtcgaggtgcccgaaggaccgcgcacctggtgcatgacccgcaagcccggtgcctgaatctataacaagaaaatatatatataataagttatcacgtaagtagaacatgaaataacaatataattatcgtatgagttaaatcttaaaagtcacgtaaaagataatcatgcgtcattttgactcacgcggtcgttatagttcaaaatcagtgacacttaccgcattgacaagcacgcctcacgggagctccaagcggcgactgagatgtcctaaatgcacagcgacggattcgcgctatttagaaagagagagcaatatttcaagaatgcatgcgtcaattttacgcagactatctttctagggttaaaaaaagcttggcgtaatcatggtcatagctgtttcctgtgtgaaattgttatccgctcacaattccacacaacatacgagccggaagcataaagtgtaaagcctggggtgcctaatgagtgagctaactcacattaattgcgttgcgctcactgcccgctttccagtcgggaaacctgtcgtgccagctgcattaatgaatcggccaacgcgcggggagaggcggtttgcgtattgggcgctcttccgcttcctcgctcactgactcgctgcgctcggtcgttcggctgcggcgagcggtatcagctcactcaaaggcggtaatacggttatccacagaatcaggggataacgcaggaaagaacatgtgagcaaaaggccagcaaaaggccaggaaccgtaaaaaggccgcgttgctggcgtttttccataggctccgcccccctgacgagcatcacaaaaatcgacgctcaagtcagaggtggcgaaacccgacaggactataaagataccaggcgtttccccctggaagctccctcgtgcgctctcctgttccgaccctgccgcttaccggatacctgtccgcctttctcccttcgggaagcgtggcgctttctcatagctcacgctgtaggtatctcagttcggtgtaggtcgttcgctccaagctgggctgtgtgcacgaaccccccgttcagcccgaccgctgcgccttatccggtaactatcgtcttgagtccaacccggtaagacacgacttatcgccactggcagcagccactggtaacaggattagcagagcgaggtatgtaggcggtgctacagagttcttgaagtggtggcctaactacggctacactagaagaacagtatttggtatctgcgctctgctgaagccagttaccttcggaaaaagagttggtagctcttgatccggcaaacaaaccaccgctggtagcggtggtttttttgtttgcaagcagcagattacgcgcagaaaaaaaggatctcaagaagatcctttgatcttttctacggggtctgacgctcagtggaacgaaaactcacgttaagggattttggtcatgagattatcaaaaaggatcttcacctagatccttttaaattaaaaatgaagttttaaatcaatctaaagtatatatgagtaaacttggtctgacagttaccaatgcttaatcagtgaggcacctatctcagcgatctgtctatttcgttcatccatagttgcctgactccccgtcgtgtagataactacgatacgggagggcttaccatctggccccagtgctgcaatgataccgcgagacccacgctcaccggctccagatttatcagcaataaaccagccagccggaagggccgagcgcagaagtggtcctgcaactttatccgcctccatccagtctattaattgttgccgggaagctagagtaagtagttcgccagttaatagtttgcgcaacgttgttgccattgctacaggcatcgtggtgtcacgctcgtcgtttggtatggcttcattcagctccggttcccaacgatcaaggcgagttacatgatcccccatgttgtgcaaaaaagcggttagctccttcggtcctccgatcgttgtcagaagtaagttggccgcagtgttatcactcatggttatggcagcactgcataattctcttactgtcatgccatccgtaagatgcttttctgtgactggtgagtactcaaccaagtcattctgagaatagtgtatgcggcgaccgagttgctcttgcccggcgtcaatacgggataataccgcgccacatagcagaactttaaaagtgctcatcattggaaaacgttcttcggggcgaaaactctcaaggatcttaccgctgttgagatccagttcgatgtaacccactcgtgcacccaactgatcttcagcatcttttactttcaccagcgtttctgggtgagcaaaaacaggaaggcaaaatgccgcaaaaaagggaataagggcgacacggaaatgttgaatactcatactcttcctttttcaatattattgaagcatttatcagggttattgtctcatgagcggatacatatttgaatgtatttagaaaaataaacaaataggggttccgcgcacatttccccgaaaagtgccacctgacgtctaagaaaccattattatcatgacattaacctataaaaataggcgtatcacgaggccctttcg

SEQ ID NO: 55 - DNA, 8059 bp, synthetic construct
  source 1..8059: mol_type = other DNA
tctcgcgcgtttcggtgatgacggtgaaaacctctgacacatgcagctcccggagacggtcacagcttgtctgtaagcggatgccgggagcagacaagcccgtcagggcgcgtcagcgggtgttggcgggtgtcggggctggcttaactatgcggcatcagagcagattgtactgagagtgcaccatatgcggtgtgaaataccgcacagatgcgtaaggagaaaataccgcatcaggcgccattcgccattcaggctgcgcaactgttgggaagggcgatcggtgcgggcctcttcgctattacgccagctggcgaaagggggatgtgctgcaaggcgattaagttgggtaacgccagggttttcccagtcacgacgttgtaaaacgacggccagtgaattcaagctttattatttaaccctagaaagataatcatattgtgacgtacgttaaagataatcatgcgtaaaattgacgcatgtgttttatcggtctgtatatcgaggtttatttattaatttgaatagatattaagttttattatatttacacttacatactaataataaattcaacaaacaatttatttatgtttatttatttattaaaaaaaaacaaaaactcaaaatttcttctataaagtaacaaaacttttaaacattctctcttttacaaaaataaacttattttgtactttaaaaacagtcatgttgtaatcgataataagtaattagcttaacctatacataatagaaacaaattatacttattagtcagtcagaaacaactttggcacatatcaatattatgctctcgttaattaactcgagggatccggcgcgcctgtcattctaaatctctctttcagcctaaagctttttccccgtatccccccaggtgtctgcaggctcaaagagcagcgagaagcgttcagaggaaagcgatcccgtgccaccttccccgtgcccgggctgtccccgcacgctgccggctcggggatgcggggggagcgccggaccggagcggagccccgggcggctcgctgctgccccctagcgggggagggacgtaattacatccctgggggctttgggagggggctgtccccgtgagctcccaggcgcgcctgtcattctaaatctctctttcagcctaaagctttttccccgtatccccccaggtgtctgcaggctcaaagagcagcgagaagcgttcagaggaaagcgatcccgtgccaccttccccgtgcccgggctgtccccgcacgctgccggctcggggatgcggggggagcgccggaccggagcggagccccgggcggctcgctgctgccccctagcgggggagggacgtaattacatccctgggggctttgggggggggctgtccccgtgagctcccaggcgcgccgctagccaagaattcctcgagtttactccctatcagtgatagagaacgtatgaagagtttactccctatcagtgatagagaacgtatgcagactttactccctatcagtgatagagaacgtataaggagtttactccctatcagtgatagagaacgtatgaccagtttactccctatcagtgatagagaacgtatctacagtttactccctatcagtgatagagaacgtatatccagtttactccctatcagtgatagagaacgtataagctttaggcgtgtacggtgggcgcctataaaagcagagctcgtttagtgaaccgtcagatcgcctggagcaattccacaacacttttgtcttataccaactttccgtaccacttcctaccctcgtaaaccgcggtggcggccatcacaagtttgtacaaaaaagcaggcttggaaggagttcgaagccaccatgggcgcggcccagccggccatggctggatccatggcgcaagtacagctggttgagagtggtggtggcctggtacaggctggtgcagccttacgcctgtcatgtgcggcgtctggcgggacattctcgttctacaacatggggtggtttcgccaagctcctggcaaagaacgcgaattcgtggtgtccattagccgttctggtggaggcactgcgtatgccgatagcgtcaaaggccggtttacgatcagtcgcgacaatgccaagaataccgcgtatctgcagatgaactccctcaaaccggaagataccgccgtctactactgcgcagcaggcttgcgtgattggggtcgtgaaggcgaaccgcattattggggccaaggaacccaggtgacggttagcggtcttgaggtgctgtttcaggggccatcgctcgagcaccaccaccaccaccacaagccggaggacaccgcagtatattattgcaatgtcaacgtggggtttgaatattggggccaggggactcaggtgacggtgagctctggcagcattgtcatcatcactgtggtagcagccgcagtcataatgggcactgcaggcctcagcacgtacctctataaccgccagcggaagatcaagaaatacagactacaacaggcccaaaaagggacccccatgaaaccgaacacacaagccacgcctcccggaggatcctacccatacgacgtaccagattacgcttagaagctttaacagcttatcgataatcaacctctggattacaaaatttgtgaaagattgactggtattcttaactatgttgctccttttacgctatgtggatacgctgctttaatgcctttgtatcatgctattgcttcccgtatggctttcattttctcctccttgtataaatcctggttgctgtctctttatgaggagttgtggcccgttgtcaggcaacgtggcgtggtgtgcactgtgtttgctgacgcaacccccactggttggggcattgccaccacctgtcagctcctttccgggactttcgctttccccctccctattgccacggcggaactcatcgccgcctgccttgcccgctgctggacaggggctcggctgttgggcactgacaattccgtggtgttgtcggggaaatcatcgtcctttccttggctgctcgcctgtgttgccacctggattctgcgcgggacgtccttctgctacgtcccttcggccctcaatccagcggaccttccttcccgcggcctgctgccggctctgcggcctcttccgcgtcttcgccttcgccctcagacgagtcggatctccctttgggccgcctccccgcatcgataccgtcgactcgctgatcagcctcgactgtgccttctagttgccagccatctgttgtttgcccctcccccgtgccttccttgaccctggaaggtgccactcccactgtcctttcctaataaaatgaggaaattgcatcgcattgtctgagtaggtgtcattctattctggggggtggggtggggcaggacagcaagggggaggattgggaagacaatagcaggcatgctggggatgcggtgggctctatgggcaacccagctttcttgtacaaagtggtgatccaaccggcaagttaacaacaacaattgatctgcgatcgctccggtgcccgtcagtgggcagagcgcacatcgcccacagtccccgagaagttggggggaggggtcggcaattgaacgggtgcctagagaaggtggcgcggggtaaactgggaaagtgatgtcgtgtactggctccgcctttttcccgagggtgggggagaaccgtatataagtgcagtagtcgccgtgaacgttctttttcgcaacgggtttgccgccagaacacagctgaagcttcgaggggctcgcatctctccttcacgcgcccgccgccctacctgaggccgccatccacgccggttgagtcgcgttctgccgcctcccgcctgtggtgcctcctgaactgcgtccgccgtctaggtaagtttaaagctcaggtcgagaccgggcctttgtccggcgctcccttggagcctacctagactcagccggctctccacgctttgcctgaccctgcttgctcaactctacgtctttgtttcgttttctgttctgcgccgttacagatccaagctgtgaccggcgcctactctagagccgccatgtctagactggacaagagcaaagtcataaactctgctctggaattactcaatggagtcggtatcgaaggcctgacgacaaggaaactcgctcaaaagctgggagttgagcagcctaccctgtactggcacgtgaagaacaagcgggccctgctcgatgccctgccaatcgagatgctggacaggcatcatacccactcctgccccctggaaggcgagtcatggcaagactttctgcggaacaacgccaagtcataccgctgtgctctcctctcacatcgcgacggggctaaagtgcatctcggcacccgcccaacagagaaacagtacgaaaccctggaaaatcagctcgcgttcctgtgtcagcaaggcttctccctggagaacgcactgtacgctctgtccgccgtgggccactttacactgggctgcgtattggaggaacaggagcatcaagtagcaaaagaggaaagagagacacctaccaccgattctatgcccccacttctgaaacaagcaattgagctgttcgaccggcagggagccgaacctgccttccttttcggcctggaactaatcatatgtggcctggagaaacagctaaagtgcgaaagcggcgggccgaccgacgcccttgacgattttgacttagacatgctcccagccgatgcccttgacgactttgaccttgatatgctgcctgctgacgctcttgacgattttgaccttgacatgctccccggggagggcagaggagccactaacttctccctgttgaaacaagcaggggatgtcgaagagaatcccgggccaatgaccgagtacaagcccacggtgcgcctcgccacccgcgacgacgtccccagggccgtacgcaccctcgccgccgcgttcgccgactaccccgccacgcgccacaccgtcgatccggaccgccacatcgagcgggtcaccgagctgcaagaactcttcctcacgcgcgtcgggctcgacatcggcaaggtgtgggtcgcggacgacggcgccgcggtggcggtctggaccacgccggagagcgtcgaagcgggggcggtgttcgccgagatcggcccgcgcatggccgagttgagcggttcccggctggccgcgcagcaacagatggaaggcctcctggcgccgcaccggcccaaggagcccgcgtggttcctggccaccgtcggcgtctcgcccgaccaccagggcaagggtctgggcagcgccgtcgtgctccccggagtggaggcggccgagcgcgccggggtgcccgccttcctggaaacctccgcgccccgcaacctccccttctacgagcggctcggcttcaccgtcaccgccgacgtcgaggtgcccgaaggaccgcgcacctggtgcatgacccgcaagcccggtgcctgaatctataacaagaaaatatatatataataagttatcacgtaagtagaacatgaaataacaatataattatcgtatgagttaaatcttaaaagtcacgtaaaagataatcatgcgtcattttgactcacgcggtcgttatagttcaaaatcagtgacacttaccgcattgacaagcacgcctcacgggagctccaagcggcgactgagatgtcctaaatgcacagcgacggattcgcgctatttagaaagagagagcaatatttcaagaatgcatgcgtcaattttacgcagactatctttctagggttaaaaaaagcttggcgtaatcatggtcatagctgtttcctgtgtgaaattgttatccgctcacaattccacacaacatacgagccggaagcataaagtgtaaagcctggggtgcctaatgagtgagctaactcacattaattgcgttgcgctcactgcccgctttccagtcgggaaacctgtcgtgccagctgcattaatgaatcggccaacgcgcggggagaggcggtttgcgtattgggcgctcttccgcttcctcgctcactgactcgctgcgctcggtcgttcggctgcggcgagcggtatcagctcactcaaaggcggtaatacggttatccacagaatcaggggataacgcaggaaagaacatgtgagcaaaaggccagcaaaaggccaggaaccgtaaaaaggccgcgttgctggcgtttttccataggctccgcccccctgacgagcatcacaaaaatcgacgctcaagtcagaggtggcgaaacccgacaggactataaagataccaggcgtttccccctggaagctccctcgtgcgctctcctgttccgaccctgccgcttaccggatacctgtccgcctttctcccttcgggaagcgtggcgctttctcatagctcacgctgtaggtatctcagttcggtgtaggtcgttcgctccaagctgggctgtgtgcacgaaccccccgttcagcccgaccgctgcgccttatccggtaactatcgtcttgagtccaacccggtaagacacgacttatcgccactggcagcagccactggtaacaggattagcagagcgaggtatgtaggcggtgctacagagttcttgaagtggtggcctaactacggctacactagaagaacagtatttggtatctgcgctctgctgaagccagttaccttcggaaaaagagttggtagctcttgatccggcaaacaaaccaccgctggtagcggtggtttttttgtttgcaagcagcagattacgcgcagaaaaaaaggatctcaagaagatcctttgatcttttctacggggtctgacgctcagtggaacgaaaactcacgttaagggattttggtcatgagattatcaaaaaggatcttcacctagatccttttaaattaaaaatgaagttttaaatcaatctaaagtatatatgagtaaacttggtctgacagttaccaatgcttaatcagtgaggcacctatctcagcgatctgtctatttcgttcatccatagttgcctgactccccgtcgtgtagataactacgatacgggagggcttaccatctggccccagtgctgcaatgataccgcgagacccacgctcaccggctccagatttatcagcaataaaccagccagccggaagggccgagcgcagaagtggtcctgcaactttatccgcctccatccagtctattaattgttgccgggaagctagagtaagtagttcgccagttaatagtttgcgcaacgttgttgccattgctacaggcatcgtggtgtcacgctcgtcgtttggtatggcttcattcagctccggttcccaacgatcaaggcgagttacatgatcccccatgttgtgcaaaaaagcggttagctccttcggtcctccgatcgttgtcagaagtaagttggccgcagtgttatcactcatggttatggcagcactgcataattctcttactgtcatgccatccgtaagatgcttttctgtgactggtgagtactcaaccaagtcattctgagaatagtgtatgcggcgaccgagttgctcttgcccggcgtcaatacgggataataccgcgccacatagcagaactttaaaagtgctcatcattggaaaacgttcttcggggcgaaaactctcaaggatcttaccgctgttgagatccagttcgatgtaacccactcgtgcacccaactgatcttcagcatcttttactttcaccagcgtttctgggtgagcaaaaacaggaaggcaaaatgccgcaaaaaagggaataagggcgacacggaaatgttgaatactcatactcttcctttttcaatattattgaagcatttatcagggttattgtctcatgagcggatacatatttgaatgtatttagaaaaataaacaaataggggttccgcgcacatttccccgaaaagtgccacctgacgtctaagaaaccattattatcatgacattaacctataaaaataggcgtatcacgaggccctttcg

SEQ ID NO: 56 - DNA, 8074 bp, synthetic construct
  source 1..8074: mol_type = other DNA
tctcgcgcgtttcggtgatgacggtgaaaacctctgacacatgcagctcccggagacggtcacagcttgtctgtaagcggatgccgggagcagacaagcccgtcagggcgcgtcagcgggtgttggcgggtgtcggggctggcttaactatgcggcatcagagcagattgtactgagagtgcaccatatgcggtgtgaaataccgcacagatgcgtaaggagaaaataccgcatcaggcgccattcgccattcaggctgcgcaactgttgggaagggcgatcggtgcgggcctcttcgctattacgccagctggcgaaagggggatgtgctgcaaggcgattaagttgggtaacgccagggttttcccagtcacgacgttgtaaaacgacggccagtgaattcaagctttattatttaaccctagaaagataatcatattgtgacgtacgttaaagataatcatgcgtaaaattgacgcatgtgttttatcggtctgtatatcgaggtttatttattaatttgaatagatattaagttttattatatttacacttacatactaataataaattcaacaaacaatttatttatgtttatttatttattaaaaaaaaacaaaaactcaaaatttcttctataaagtaacaaaacttttaaacattctctcttttacaaaaataaacttattttgtactttaaaaacagtcatgttgtaatcgataataagtaattagcttaacctatacataatagaaacaaattatacttattagtcagtcagaaacaactttggcacatatcaatattatgctctcgttaattaactcgagggatccggcgcgcctgtcattctaaatctctctttcagcctaaagctttttccccgtatccccccaggtgtctgcaggctcaaagagcagcgagaagcgttcagaggaaagcgatcccgtgccaccttccccgtgcccgggctgtccccgcacgctgccggctcggggatgcggggggagcgccggaccggagcggagccccgggcggctcgctgctgccccctagcgggggagggacgtaattacatccctgggggctttgggagggggctgtccccgtgagctcccaggcgcgcctgtcattctaaatctctctttcagcctaaagctttttccccgtatccccccaggtgtctgcaggctcaaagagcagcgagaagcgttcagaggaaagcgatcccgtgccaccttccccgtgcccgggctgtccccgcacgctgccggctcggggatgcggggggagcgccggaccggagcggagccccgggcggctcgctgctgccccctagcgggggagggacgtaattacatccctgggggctttgggggggggctgtccccgtgagctcccaggcgcgccgctagccaagaattcctcgagtttactccctatcagtgatagagaacgtatgaagagtttactccctatcagtgatagagaacgtatgcagactttactccctatcagtgatagagaacgtataaggagtttactccctatcagtgatagagaacgtatgaccagtttactccctatcagtgatagagaacgtatctacagtttactccctatcagtgatagagaacgtatatccagtttactccctatcagtgatagagaacgtataagctttaggcgtgtacggtgggcgcctataaaagcagagctcgtttagtgaaccgtcagatcgcctggagcaattccacaacacttttgtcttataccaactttccgtaccacttcctaccctcgtaaaccgcggtggcggccatcacaagtttgtacaaaaaagcaggcttggaaggagttcgaagccaccatgggcgcggcccagccggccatggctggatccatggcgcaagtgcagctggtggaaagcggaggaggccttgttcaggctggtgggagcttgcgcctgtcttgtgcggcaagtggccgcaccttttcgacatctgccatgggctggtttcgtcaagccccaggtcgtgaacgggagtttgtggctgccattacctggacggtaggcaacaccatctatggcgacagcatgaaaggtcgcttcaccatttcgcgtgatcgcacgaagaataccgtggatctccagatggattccctgaaaccggaagatactgcggtctattactgcacagcacgttcacgcggtttcgttctgagcgatctgcgcagtgtcgactcgttcgactacaaaggccaagggactcaggtaacggtttccggcttagaggtcctgtttcagggtccgtcactcgagcaccaccaccaccaccacaagccggaggacaccgcagtatattattgcaatgtcaacgtggggtttgaatattggggccaggggactcaggtgacggtgagctctggcagcattgtcatcatcactgtggtagcagccgcagtcataatgggcactgcaggcctcagcacgtacctctataaccgccagcggaagatcaagaaatacagactacaacaggcccaaaaagggacccccatgaaaccgaacacacaagccacgcctcccggaggatcctacccatacgacgtaccagattacgcttagaagctttaacagcttatcgataatcaacctctggattacaaaatttgtgaaagattgactggtattcttaactatgttgctccttttacgctatgtggatacgctgctttaatgcctttgtatcatgctattgcttcccgtatggctttcattttctcctccttgtataaatcctggttgctgtctctttatgaggagttgtggcccgttgtcaggcaacgtggcgtggtgtgcactgtgtttgctgacgcaacccccactggttggggcattgccaccacctgtcagctcctttccgggactttcgctttccccctccctattgccacggcggaactcatcgccgcctgccttgcccgctgctggacaggggctcggctgttgggcactgacaattccgtggtgttgtcggggaaatcatcgtcctttccttggctgctcgcctgtgttgccacctggattctgcgcgggacgtccttctgctacgtcccttcggccctcaatccagcggaccttccttcccgcggcctgctgccggctctgcggcctcttccgcgtcttcgccttcgccctcagacgagtcggatctccctttgggccgcctccccgcatcgataccgtcgactcgctgatcagcctcgactgtgccttctagttgccagccatctgttgtttgcccctcccccgtgccttccttgaccctggaaggtgccactcccactgtcctttcctaataaaatgaggaaattgcatcgcattgtctgagtaggtgtcattctattctggggggtggggtggggcaggacagcaagggggaggattgggaagacaatagcaggcatgctggggatgcggtgggctctatgggcaacccagctttcttgtacaaagtggtgatccaaccggcaagttaacaacaacaattgatctgcgatcgctccggtgcccgtcagtgggcagagcgcacatcgcccacagtccccgagaagttggggggaggggtcggcaattgaacgggtgcctagagaaggtggcgcggggtaaactgggaaagtgatgtcgtgtactggctccgcctttttcccgagggtgggggagaaccgtatataagtgcagtagtcgccgtgaacgttctttttcgcaacgggtttgccgccagaacacagctgaagcttcgaggggctcgcatctctccttcacgcgcccgccgccctacctgaggccgccatccacgccggttgagtcgcgttctgccgcctcccgcctgtggtgcctcctgaactgcgtccgccgtctaggtaagtttaaagctcaggtcgagaccgggcctttgtccggcgctcccttggagcctacctagactcagccggctctccacgctttgcctgaccctgcttgctcaactctacgtctttgtttcgttttctgttctgcgccgttacagatccaagctgtgaccggcgcctactctagagccgccatgtctagactggacaagagcaaagtcataaactctgctctggaattactcaatggagtcggtatcgaaggcctgacgacaaggaaactcgctcaaaagctgggagttgagcagcctaccctgtactggcacgtgaagaacaagcgggccctgctcgatgccctgccaatcgagatgctggacaggcatcatacccactcctgccccctggaaggcgagtcatggcaagactttctgcggaacaacgccaagtcataccgctgtgctctcctctcacatcgcgacggggctaaagtgcatctcggcacccgcccaacagagaaacagtacgaaaccctggaaaatcagctcgcgttcctgtgtcagcaaggcttctccctggagaacgcactgtacgctctgtccgccgtgggccactttacactgggctgcgtattggaggaacaggagcatcaagtagcaaaagaggaaagagagacacctaccaccgattctatgcccccacttctgaaacaagcaattgagctgttcgaccggcagggagccgaacctgccttccttttcggcctggaactaatcatatgtggcctggagaaacagctaaagtgcgaaagcggcgggccgaccgacgcccttgacgattttgacttagacatgctcccagccgatgcccttgacgactttgaccttgatatgctgcctgctgacgctcttgacgattttgaccttgacatgctccccggggagggcagaggagccactaacttctccctgttgaaacaagcaggggatgtcgaagagaatcccgggccaatgaccgagtacaagcccacggtgcgcctcgccacccgcgacgacgtccccagggccgtacgcaccctcgccgccgcgttcgccgactaccccgccacgcgccacaccgtcgatccggaccgccacatcgagcgggtcaccgagctgcaagaactcttcctcacgcgcgtcgggctcgacatcggcaaggtgtgggtcgcggacgacggcgccgcggtggcggtctggaccacgccggagagcgtcgaagcgggggcggtgttcgccgagatcggcccgcgcatggccgagttgagcggttcccggctggccgcgcagcaacagatggaaggcctcctggcgccgcaccggcccaaggagcccgcgtggttcctggccaccgtcggcgtctcgcccgaccaccagggcaagggtctgggcagcgccgtcgtgctccccggagtggaggcggccgagcgcgccggggtgcccgccttcctggaaacctccgcgccccgcaacctccccttctacgagcggctcggcttcaccgtcaccgccgacgtcgaggtgcccgaaggaccgcgcacctggtgcatgacccgcaagcccggtgcctgaatctataacaagaaaatatatatataataagttatcacgtaagtagaacatgaaataacaatataattatcgtatgagttaaatcttaaaagtcacgtaaaagataatcatgcgtcattttgactcacgcggtcgttatagttcaaaatcagtgacacttaccgcattgacaagcacgcctcacgggagctccaagcggcgactgagatgtcctaaatgcacagcgacggattcgcgctatttagaaagagagagcaatatttcaagaatgcatgcgtcaattttacgcagactatctttctagggttaaaaaaagcttggcgtaatcatggtcatagctgtttcctgtgtgaaattgttatccgctcacaattccacacaacatacgagccggaagcataaagtgtaaagcctggggtgcctaatgagtgagctaactcacattaattgcgttgcgctcactgcccgctttccagtcgggaaacctgtcgtgccagctgcattaatgaatcggccaacgcgcggggagaggcggtttgcgtattgggcgctcttccgcttcctcgctcactgactcgctgcgctcggtcgttcggctgcggcgagcggtatcagctcactcaaaggcggtaatacggttatccacagaatcaggggataacgcaggaaagaacatgtgagcaaaaggccagcaaaaggccaggaaccgtaaaaaggccgcgttgctggcgtttttccataggctccgcccccctgacgagcatcacaaaaatcgacgctcaagtcagaggtggcgaaacccgacaggactataaagataccaggcgtttccccctggaagctccctcgtgcgctctcctgttccgaccctgccgcttaccggatacctgtccgcctttctcccttcgggaagcgtggcgctttctcatagctcacgctgtaggtatctcagttcggtgtaggtcgttcgctccaagctgggctgtgtgcacgaaccccccgttcagcccgaccgctgcgccttatccggtaactatcgtcttgagtccaacccggtaagacacgacttatcgccactggcagcagccactggtaacaggattagcagagcgaggtatgtaggcggtgctacagagttcttgaagtggtggcctaactacggctacactagaagaacagtatttggtatctgcgctctgctgaagccagttaccttcggaaaaagagttggtagctcttgatccggcaaacaaaccaccgctggtagcggtggtttttttgtttgcaagcagcagattacgcgcagaaaaaaaggatctcaagaagatcctttgatcttttctacggggtctgacgctcagtggaacgaaaactcacgttaagggattttggtcatgagattatcaaaaaggatcttcacctagatccttttaaattaaaaatgaagttttaaatcaatctaaagtatatatgagtaaacttggtctgacagttaccaatgcttaatcagtgaggcacctatctcagcgatctgtctatttcgttcatccatagttgcctgactccccgtcgtgtagataactacgatacgggagggcttaccatctggccccagtgctgcaatgataccgcgagacccacgctcaccggctccagatttatcagcaataaaccagccagccggaagggccgagcgcagaagtggtcctgcaactttatccgcctccatccagtctattaattgttgccgggaagctagagtaagtagttcgccagttaatagtttgcgcaacgttgttgccattgctacaggcatcgtggtgtcacgctcgtcgtttggtatggcttcattcagctccggttcccaacgatcaaggcgagttacatgatcccccatgttgtgcaaaaaagcggttagctccttcggtcctccgatcgttgtcagaagtaagttggccgcagtgttatcactcatggttatggcagcactgcataattctcttactgtcatgccatccgtaagatgcttttctgtgactggtgagtactcaaccaagtcattctgagaatagtgtatgcggcgaccgagttgctcttgcccggcgtcaatacgggataataccgcgccacatagcagaactttaaaagtgctcatcattggaaaacgttcttcggggcgaaaactctcaaggatcttaccgctgttgagatccagttcgatgtaacccactcgtgcacccaactgatcttcagcatcttttactttcaccagcgtttctgggtgagcaaaaacaggaaggcaaaatgccgcaaaaaagggaataagggcgacacggaaatgttgaatactcatactcttcctttttcaatattattgaagcatttatcagggttattgtctcatgagcggatacatatttgaatgtatttagaaaaataaacaaataggggttccgcgcacatttccccgaaaagtgccacctgacgtctaagaaaccattattatcatgacattaacctataaaaataggcgtatcacgaggccctttcg

SEQ ID NO: 57 - DNA, 8056 bp, synthetic construct
  source 1..8056: mol_type = other DNA
tctcgcgcgtttcggtgatgacggtgaaaacctctgacacatgcagctcccggagacggtcacagcttgtctgtaagcggatgccgggagcagacaagcccgtcagggcgcgtcagcgggtgttggcgggtgtcggggctggcttaactatgcggcatcagagcagattgtactgagagtgcaccatatgcggtgtgaaataccgcacagatgcgtaaggagaaaataccgcatcaggcgccattcgccattcaggctgcgcaactgttgggaagggcgatcggtgcgggcctcttcgctattacgccagctggcgaaagggggatgtgctgcaaggcgattaagttgggtaacgccagggttttcccagtcacgacgttgtaaaacgacggccagtgaattcaagctttattatttaaccctagaaagataatcatattgtgacgtacgttaaagataatcatgcgtaaaattgacgcatgtgttttatcggtctgtatatcgaggtttatttattaatttgaatagatattaagttttattatatttacacttacatactaataataaattcaacaaacaatttatttatgtttatttatttattaaaaaaaaacaaaaactcaaaatttcttctataaagtaacaaaacttttaaacattctctcttttacaaaaataaacttattttgtactttaaaaacagtcatgttgtaatcgataataagtaattagcttaacctatacataatagaaacaaattatacttattagtcagtcagaaacaactttggcacatatcaatattatgctctcgttaattaactcgagggatccggcgcgcctgtcattctaaatctctctttcagcctaaagctttttccccgtatccccccaggtgtctgcaggctcaaagagcagcgagaagcgttcagaggaaagcgatcccgtgccaccttccccgtgcccgggctgtccccgcacgctgccggctcggggatgcggggggagcgccggaccggagcggagccccgggcggctcgctgctgccccctagcgggggagggacgtaattacatccctgggggctttgggagggggctgtccccgtgagctcccaggcgcgcctgtcattctaaatctctctttcagcctaaagctttttccccgtatccccccaggtgtctgcaggctcaaagagcagcgagaagcgttcagaggaaagcgatcccgtgccaccttccccgtgcccgggctgtccccgcacgctgccggctcggggatgcggggggagcgccggaccggagcggagccccgggcggctcgctgctgccccctagcgggggagggacgtaattacatccctgggggctttgggggggggctgtccccgtgagctcccaggcgcgccgctagccaagaattcctcgagtttactccctatcagtgatagagaacgtatgaagagtttactccctatcagtgatagagaacgtatgcagactttactccctatcagtgatagagaacgtataaggagtttactccctatcagtgatagagaacgtatgaccagtttactccctatcagtgatagagaacgtatctacagtttactccctatcagtgatagagaacgtatatccagtttactccctatcagtgatagagaacgtataagctttaggcgtgtacggtgggcgcctataaaagcagagctcgtttagtgaaccgtcagatcgcctggagcaattccacaacacttttgtcttataccaactttccgtaccacttcctaccctcgtaaaccgcggtggcggccatcacaagtttgtacaaaaaagcaggcttggaaggagttcgaagccaccatgggcgcggcccagccggccatggctggatccatggccgatgtccagcttgtcgaatccggtggaggcttggttcaagcgggtgatagcctgcgcttatcgtgtgcggcaagtggtccgacaggtgctatggcctggtttcatcagggtctgggcaaagaacgcgaattcgtaggcggcatttccccatcaggggacaacatctactatgccgatagcgttaaaggtcgcttcaccattgatcgggacaatgcgaagaatacggtgtctctgcagatgaactcgctgaaaccggaggatatgggcgtgtactattgcgcagctcgtcgtcgcgtaaccctcttcacgagtcgcaccgactatgagttttggggacgtggcactcaagtgaccgttagcggcctggaagtgctgtttcaggggccttctctcgagcaccaccaccaccaccacaagccggaggacaccgcagtatattattgcaatgtcaacgtggggtttgaatattggggccaggggactcaggtgacggtgagctctggcagcattgtcatcatcactgtggtagcagccgcagtcataatgggcactgcaggcctcagcacgtacctctataaccgccagcggaagatcaagaaatacagactacaacaggcccaaaaagggacccccatgaaaccgaacacacaagccacgcctcccggaggatcctacccatacgacgtaccagattacgcttagaagctttaacagcttatcgataatcaacctctggattacaaaatttgtgaaagattgactggtattcttaactatgttgctccttttacgctatgtggatacgctgctttaatgcctttgtatcatgctattgcttcccgtatggctttcattttctcctccttgtataaatcctggttgctgtctctttatgaggagttgtggcccgttgtcaggcaacgtggcgtggtgtgcactgtgtttgctgacgcaacccccactggttggggcattgccaccacctgtcagctcctttccgggactttcgctttccccctccctattgccacggcggaactcatcgccgcctgccttgcccgctgctggacaggggctcggctgttgggcactgacaattccgtggtgttgtcggggaaatcatcgtcctttccttggctgctcgcctgtgttgccacctggattctgcgcgggacgtccttctgctacgtcccttcggccctcaatccagcggaccttccttcccgcggcctgctgccggctctgcggcctcttccgcgtcttcgccttcgccctcagacgagtcggatctccctttgggccgcctccccgcatcgataccgtcgactcgctgatcagcctcgactgtgccttctagttgccagccatctgttgtttgcccctcccccgtgccttccttgaccctggaaggtgccactcccactgtcctttcctaataaaatgaggaaattgcatcgcattgtctgagtaggtgtcattctattctggggggtggggtggggcaggacagcaagggggaggattgggaagacaatagcaggcatgctggggatgcggtgggctctatgggcaacccagctttcttgtacaaagtggtgatccaaccggcaagttaacaacaacaattgatctgcgatcgctccggtgcccgtcagtgggcagagcgcacatcgcccacagtccccgagaagttggggggaggggtcggcaattgaacgggtgcctagagaaggtggcgcggggtaaactgggaaagtgatgtcgtgtactggctccgcctttttcccgagggtgggggagaaccgtatataagtgcagtagtcgccgtgaacgttctttttcgcaacgggtttgccgccagaacacagctgaagcttcgaggggctcgcatctctccttcacgcgcccgccgccctacctgaggccgccatccacgccggttgagtcgcgttctgccgcctcccgcctgtggtgcctcctgaactgcgtccgccgtctaggtaagtttaaagctcaggtcgagaccgggcctttgtccggcgctcccttggagcctacctagactcagccggctctccacgctttgcctgaccctgcttgctcaactctacgtctttgtttcgttttctgttctgcgccgttacagatccaagctgtgaccggcgcctactctagagccgccatgtctagactggacaagagcaaagtcataaactctgctctggaattactcaatggagtcggtatcgaaggcctgacgacaaggaaactcgctcaaaagctgggagttgagcagcctaccctgtactggcacgtgaagaacaagcgggccctgctcgatgccctgccaatcgagatgctggacaggcatcatacccactcctgccccctggaaggcgagtcatggcaagactttctgcggaacaacgccaagtcataccgctgtgctctcctctcacatcgcgacggggctaaagtgcatctcggcacccgcccaacagagaaacagtacgaaaccctggaaaatcagctcgcgttcctgtgtcagcaaggcttctccctggagaacgcactgtacgctctgtccgccgtgggccactttacactgggctgcgtattggaggaacaggagcatcaagtagcaaaagaggaaagagagacacctaccaccgattctatgcccccacttctgaaacaagcaattgagctgttcgaccggcagggagccgaacctgccttccttttcggcctggaactaatcatatgtggcctggagaaacagctaaagtgcgaaagcggcgggccgaccgacgcccttgacgattttgacttagacatgctcccagccgatgcccttgacgactttgaccttgatatgctgcctgctgacgctcttgacgattttgaccttgacatgctccccggggagggcagaggagccactaacttctccctgttgaaacaagcaggggatgtcgaagagaatcccgggccaatgaccgagtacaagcccacggtgcgcctcgccacccgcgacgacgtccccagggccgtacgcaccctcgccgccgcgttcgccgactaccccgccacgcgccacaccgtcgatccggaccgccacatcgagcgggtcaccgagctgcaagaactcttcctcacgcgcgtcgggctcgacatcggcaaggtgtgggtcgcggacgacggcgccgcggtggcggtctggaccacgccggagagcgtcgaagcgggggcggtgttcgccgagatcggcccgcgcatggccgagttgagcggttcccggctggccgcgcagcaacagatggaaggcctcctggcgccgcaccggcccaaggagcccgcgtggttcctggccaccgtcggcgtctcgcccgaccaccagggcaagggtctgggcagcgccgtcgtgctccccggagtggaggcggccgagcgcgccggggtgcccgccttcctggaaacctccgcgccccgcaacctccccttctacgagcggctcggcttcaccgtcaccgccgacgtcgaggtgcccgaaggaccgcgcacctggtgcatgacccgcaagcccggtgcctgaatctataacaagaaaatatatatataataagttatcacgtaagtagaacatgaaataacaatataattatcgtatgagttaaatcttaaaagtcacgtaaaagataatcatgcgtcattttgactcacgcggtcgttatagttcaaaatcagtgacacttaccgcattgacaagcacgcctcacgggagctccaagcggcgactgagatgtcctaaatgcacagcgacggattcgcgctatttagaaagagagagcaatatttcaagaatgcatgcgtcaattttacgcagactatctttctagggttaaaaaaagcttggcgtaatcatggtcatagctgtttcctgtgtgaaattgttatccgctcacaattccacacaacatacgagccggaagcataaagtgtaaagcctggggtgcctaatgagtgagctaactcacattaattgcgttgcgctcactgcccgctttccagtcgggaaacctgtcgtgccagctgcattaatgaatcggccaacgcgcggggagaggcggtttgcgtattgggcgctcttccgcttcctcgctcactgactcgctgcgctcggtcgttcggctgcggcgagcggtatcagctcactcaaaggcggtaatacggttatccacagaatcaggggataacgcaggaaagaacatgtgagcaaaaggccagcaaaaggccaggaaccgtaaaaaggccgcgttgctggcgtttttccataggctccgcccccctgacgagcatcacaaaaatcgacgctcaagtcagaggtggcgaaacccgacaggactataaagataccaggcgtttccccctggaagctccctcgtgcgctctcctgttccgaccctgccgcttaccggatacctgtccgcctttctcccttcgggaagcgtggcgctttctcatagctcacgctgtaggtatctcagttcggtgtaggtcgttcgctccaagctgggctgtgtgcacgaaccccccgttcagcccgaccgctgcgccttatccggtaactatcgtcttgagtccaacccggtaagacacgacttatcgccactggcagcagccactggtaacaggattagcagagcgaggtatgtaggcggtgctacagagttcttgaagtggtggcctaactacggctacactagaagaacagtatttggtatctgcgctctgctgaagccagttaccttcggaaaaagagttggtagctcttgatccggcaaacaaaccaccgctggtagcggtggtttttttgtttgcaagcagcagattacgcgcagaaaaaaaggatctcaagaagatcctttgatcttttctacggggtctgacgctcagtggaacgaaaactcacgttaagggattttggtcatgagattatcaaaaaggatcttcacctagatccttttaaattaaaaatgaagttttaaatcaatctaaagtatatatgagtaaacttggtctgacagttaccaatgcttaatcagtgaggcacctatctcagcgatctgtctatttcgttcatccatagttgcctgactccccgtcgtgtagataactacgatacgggagggcttaccatctggccccagtgctgcaatgataccgcgagacccacgctcaccggctccagatttatcagcaataaaccagccagccggaagggccgagcgcagaagtggtcctgcaactttatccgcctccatccagtctattaattgttgccgggaagctagagtaagtagttcgccagttaatagtttgcgcaacgttgttgccattgctacaggcatcgtggtgtcacgctcgtcgtttggtatggcttcattcagctccggttcccaacgatcaaggcgagttacatgatcccccatgttgtgcaaaaaagcggttagctccttcggtcctccgatcgttgtcagaagtaagttggccgcagtgttatcactcatggttatggcagcactgcataattctcttactgtcatgccatccgtaagatgcttttctgtgactggtgagtactcaaccaagtcattctgagaatagtgtatgcggcgaccgagttgctcttgcccggcgtcaatacgggataataccgcgccacatagcagaactttaaaagtgctcatcattggaaaacgttcttcggggcgaaaactctcaaggatcttaccgctgttgagatccagttcgatgtaacccactcgtgcacccaactgatcttcagcatcttttactttcaccagcgtttctgggtgagcaaaaacaggaaggcaaaatgccgcaaaaaagggaataagggcgacacggaaatgttgaatactcatactcttcctttttcaatattattgaagcatttatcagggttattgtctcatgagcggatacatatttgaatgtatttagaaaaataaacaaataggggttccgcgcacatttccccgaaaagtgccacctgacgtctaagaaaccattattatcatgacattaacctataaaaataggcgtatcacgaggccctttcg

SEQ ID NO: 58 - DNA, 7318 bp, synthetic construct
  source 1..7318: mol_type = other DNA
agcgcccaatacgcaaaccgcctctccccgcgcgttggccgattcattaatgcagctggcacgacaggtttcccgactggaaagcgggcagtgagcgcaacgcaattaatgtgagttagctcactcattaggcaccccaggctttacactttatgcttccggctcgtatgttgtgtggaattgtgagcggataacaatttcacacaggaaacagctatgaccatgattacgccaagcttggtaccttaaccctagaaagatagtctgcgtaaaattgacgcatgcattcttgaaatattgctctctctttctaaatagcgcgaatccgtcgctgtgcatttaggacatctcagtcgccgcttggagctcccgtgaggcgtgcttgtcaatgcggtaagtgtcactgattttgaactataacgaccgcgtgagtcaaaatgacgcatgattatcttttacgtgacttttaagatttaactcatacgataattatattgttatttcatgttctacttacgtgataacttattatatatatattttcttgttatagatatcattaatatcgatggcgcgccggattcgacattgattattgactagttattaatagtaatcaattacggggtcattagttcatagcccatatatggagttccgcgttacataacttacggtaaatggcccgcctggctgaccgcccaacgacccccgcccattgacgtcaataatgacgtatgttcccatagtaacgccaatagggactttccattgacgtcaatgggtggagtatttacggtaaactgcccacttggcagtacatcaagtgtatcatatgccaagtacgccccctattgacgtcaatgacggtaaatggcccgcctggcattatgcccagtacatgaccttatgggactttcctacttggcagtacatctacgtattagtcatcgctattaccatggtcgaggtgagccccacgttctgcttcactctccccatctcccccccctccccacccccaattttgtatttatttattttttaattattttgtgcagcgatgggggcggggggggggggggggcgcgcgccaggcggggcggggcggggcgaggggcggggcggggcgaggcggagaggtgcggcggcagccaatcagagcggcgcgctccgaaagtttccttttatggcgaggcggcggcggcggcggccctataaaaagcgaagcgcgcggcgggcgggagtcgctgcgttgccttcgccccgtgccccgctccgcgccgcctcgcgccgcccgccccggctctgactgaccgcgttactcccacaggtgagcgggcgggacggcccttctcctccgggctgtaattagcgcttggtttaatgacggctcgtttcttttctgtggctgcgtgaaagccttaaagggctccgggagggccctttgtgcgggggggagcggctcggggggtgcgtgcgtgtgtgtgtgcgtggggagcgccgcgtgcggcccgcgctgcccggcggctgtgagcgctgcgggcgcggcgcggggctttgtgcgctccgcgtgtgcgcgaggggagcgcggccgggggcggtgccccgcggtgcgggggggctgcgaggggaacaaaggctgcgtgcggggtgtgtgcgtgggggggtgagcagggggtgtgggcgcggcggtcgggctgtaacccccccctgcacccccctccccgagttgctgagcacggcccggcttcgggtgcggggctccgtgcggggcgtggcgcggggctcgccgtgccgggcggggggtggcggcaggtgggggtgccgggcggggcggggccgcctcgggccggggagggctcgggggaggggcgcggcggccccggagcgccggcggctgtcgaggcgcggcgagccgcagccattgccttttatggtaatcgtgcgagagggcgcagggacttcctttgtcccaaatctggcggagccgaaatctgggaggcgccgccgcaccccctctagcgggcgcgggcgaagcggtgcggcgccggcaggaaggaaatgggcggggagggccttcgtgcgtcgccgcgccgccgtccccttctccatctccagcctcggggctgccgcagggggacggctgccttcgggggggacggggcagggcggggttcggcttctggcgtgtgaccggcggctctagagcctctgctaaccatgttcatgccttcttctttttcctacagatccttaattaagcaatggtgagcaagggcgaggagctgttcaccggggtggtgcccatcctggtcgagctggacggcgacgtaaacggccacaagttcagcgtgtccggcgagggcgagggcgatgccacctacggcaagctgaccctgaagttcatctgcaccaccggcaagctgcccgtgccctggcccaccctcgtgaccaccctgacctacggcgtgcagtgcttcagccgctaccccgaccacatgaagcagcacgacttcttcaagtccgccatgcccgaaggctacgtccaggagcgcaccatcttcttcaaggacgacggcaactacaagacccgcgccgaggtgaagttcgagggcgacaccctggtgaaccgcatcgagctgaagggcatcgacttcaaggaggacggcaacatcctggggcacaagctggagtacaactacaacagccacaacgtctatatcatggccgacaagcagaagaacggcatcaaggtgaacttcaagatccgccacaacatcgaggacggcagcgtgcagctcgccgaccactaccagcagaacacccccatcggcgacggccccgtgctgctgcccgacaaccactacctgagcacccagtccgccctgagcaaagaccccaacgagaagcgcgatcacatggtcctgctggagttcgtgaccgccgccgggatcactcccggcatggacgagctgtacaagggcagcattgtcatcatcactgtggtagcagccgcagtcataatgggcactgcaggcctcagcacgtacctctataaccgccagcggaagatcaagaaatacagactacaacaggcccaaaaagggacccccatgaaaccgaacacacaagccacgcctccctgattcgacgccggttaggggcccgtttaaacccgctgatcagcctcgactgtgccttctagttgccagccatctgttgtttgcccctcccccgtgccttccttgaccctggaaggtgccactcccactgtcctttcctaataaaatgaggaaattgcatcgcattgtctgagtaggtgtcattctattctggggggtggggtggggcaggacagcaagggggaggattgggaagacaatagcaggcatgctggggatgcggtgggctctatggcggcgcgcctaaaagttttgttactttatagaagaaattttgagtttttgtttttttttaataaataaataaacataaataaattgtttgttgaatttattattagtatgtaagtgtaaatataataaaacttaatatctattcaaattaataaataaacctcgatatacagaccgataaaacacatgcgtcaattttacgcatgattatctttaacgtacgtcacaatatgattatctttctagggttaaggccggccaaaagggcgaattctgcagatatccatcacactggcggccgctcgagcatgcatctagagggcccaattcgccctatagtgagtcgtattacaattcactggccgtcgttttacaacgtcgtgactgggaaaaccctggcgttacccaacttaatcgccttgcagcacatccccctttcgccagctggcgtaatagcgaagaggcccgcaccgatcgcccttcccaacagttgcgcagcctgaatggcgaatggacgcgccctgtagcggcgcattaagcgcggcgggtgtggtggttacgcgcagcgtgaccgctacacttgccagcgccctagcgcccgctcctttcgctttcttcccttcctttctcgccacgttcgccggctttccccgtcaagctctaaatcgggggctccctttagggttccgatttagtgctttacggcacctcgaccccaaaaaacttgattagggtgatggttcacgtagtgggccatcgccctgatagacggtttttcgccctttgacgttggagtccacgttctttaatagtggactcttgttccaaactggaacaacactcaaccctatctcggtctattcttttgatttataagggattttgccgatttcggcctattggttaaaaaatgagctgatttaacaaaaatttaacgcgaattttaacaaaattcagggcgcaagggctgctaaaggaagcggaacacgtagaaagccagtccgcagaaacggtgctgaccccggatgaatgtcagctactgggctatctggacaagggaaaacgcaagcgcaaagagaaagcaggtagcttgcagtgggcttacatggcgatagctagactgggcggttttatggacagcaagcgaaccggaattgccagctggggcgccctctggtaaggttgggaagccctgcaaagtaaactggatggctttcttgccgccaaggatctgatggcgcaggggatcaagatctgatcaagagacaggatgaggatcgtttcgcatgattgaacaagatggattgcacgcaggttctccggccgcttgggtggagaggctattcggctatgactgggcacaacagacaatcggctgctctgatgccgccgtgttccggctgtcagcgcaggggcgcccggttctttttgtcaagaccgacctgtccggtgccctgaatgaactgcaggacgaggcagcgcggctatcgtggctggccacgacgggcgttccttgcgcagctgtgctcgacgttgtcactgaagcgggaagggactggctgctattgggcgaagtgccggggcaggatctcctgtcatcccaccttgctcctgccgagaaagtatccatcatggctgatgcaatgcggcggctgcatacgcttgatccggctacctgcccattcgaccaccaagcgaaacatcgcatcgagcgagcacgtactcggatggaagccggtcttgtcgatcaggatgatctggacgaagagcatcaggggctcgcgccagccgaactgttcgccaggctcaaggcgcgcatgcccgacggcgaggatctcgtcgtgacccatggcgatgcctgcttgccgaatatcatggtggaaaatggccgcttttctggattcatcgactgtggccggctgggtgtggcggaccgctatcaggacatagcgttggctacccgtgatattgctgaagagcttggcggcgaatgggctgaccgcttcctcgtgctttacggtatcgccgctcccgattcgcagcgcatcgccttctatcgccttcttgacgagttcttctgaattgaaaaaggaagagtatgagtattcaacatttccgtgtcgcccttattcccttttttgcggcattttgccttcctgtttttgctcacccagaaacgctggtgaaagtaaaagatgctgaagatcagttgggtgcacgagtgggttacatcgaactggatctcaacagcggtaagatccttgagagttttcgccccgaagaacgttttccaatgatgagcacttttaaagttctgctatgtggcgcggtattatcccgtattgacgccgggcaagagcaactcggtcgccgcatacactattctcagaatgacttggttgagtactcaccagtcacagaaaagcatcttacggatggcatgacagtaagagaattatgcagtgctgccataaccatgagtgataacactgcggccaacttacttctgacaacgatcggaggaccgaaggagctaaccgcttttttgcacaacatgggggatcatgtaactcgccttgatcgttgggaaccggagctgaatgaagccataccaaacgacgagcgtgacaccacgatgcctgtagcaatggcaacaacgttgcgcaaactattaactggcgaactacttactctagcttcccggcaacaattaatagactggatggaggcggataaagttgcaggaccacttctgcgctcggcccttccggctggctggtttattgctgataaatctggagccggtgagcgtgggtctcgcggtatcattgcagcactggggccagatggtaagccctcccgtatcgtagttatctacacgacggggagtcaggcaactatggatgaacgaaatagacagatcgctgagataggtgcctcactgattaagcattggtaactgtcagaccaagtttactcatatatactttagattgatttaaaacttcatttttaatttaaaaggatctaggtgaagatcctttttgataatctcatgaccaaaatcccttaacgtgagttttcgttccactgagcgtcagaccccgtagaaaagatcaaaggatcttcttgagatcctttttttctgcgcgtaatctgctgcttgcaaacaaaaaaaccaccgctaccagcggtggtttgtttgccggatcaagagctaccaactctttttccgaaggtaactggcttcagcagagcgcagataccaaatactgttcttctagtgtagccgtagttaggccaccacttcaagaactctgtagcaccgcctacatacctcgctctgctaatcctgttaccagtggctgctgccagtggcgataagtcgtgtcttaccgggttggactcaagacgatagttaccggataaggcgcagcggtcgggctgaacggggggttcgtgcacacagcccagcttggagcgaacgacctacaccgaactgagatacctacagcgtgagctatgagaaagcgccacgcttcccgaagggagaaaggcggacaggtatccggtaagcggcagggtcggaacaggagagcgcacgagggagcttccagggggaaacgcctggtatctttatagtcctgtcgggtttcgccacctctgacttgagcgtcgatttttgtgatgctcgtcaggggggcggagcctatggaaaaacgccagcaacgcggcctttttacggttcctggccttttgctggccttttgctcacatgttctttcctgcgttatcccctgattctgtggataaccgtattaccgcctttgagtgagctgataccgctcgccgcagccgaacgaccgagcgcagcgagtcagtgagcgaggaagcggaag

SEQ ID NO: 59 - DNA, 7600 bp, synthetic construct
  source 1..7600: mol_type = other DNA
agcgcccaatacgcaaaccgcctctccccgcgcgttggccgattcattaatgcagctggcacgacaggtttcccgactggaaagcgggcagtgagcgcaacgcaattaatgtgagttagctcactcattaggcaccccaggctttacactttatgcttccggctcgtatgttgtgtggaattgtgagcggataacaatttcacacaggaaacagctatgaccatgattacgccaagcttggtaccttaaccctagaaagatagtctgcgtaaaattgacgcatgcattcttgaaatattgctctctctttctaaatagcgcgaatccgtcgctgtgcatttaggacatctcagtcgccgcttggagctcccgtgaggcgtgcttgtcaatgcggtaagtgtcactgattttgaactataacgaccgcgtgagtcaaaatgacgcatgattatcttttacgtgacttttaagatttaactcatacgataattatattgttatttcatgttctacttacgtgataacttattatatatatattttcttgttatagatatcattaatatcgatggcgcgccggattcgacattgattattgactagtaagctttgtgaacttggcggcttccaagtcgctgcctttatttaggtcttccaactaacctatggcactgttccacaatgaatgtatagaaattgggaggtgagcatgacagagtggaggaaacggaagattcatggagagggccagagagatggcccctcagccaccctgggggatgacttggacccatgtggtagaaggaggggacttccacacatgtgctatgtgtagctgtgtgtaggtacatacacacccttaaaataaaacgcaatttttttttcaaagtctcagggtgaatttggtgaagtcgatgaagctgaggcaggagaattatcaggagttcaagggcagcttgttttatagagaaaggttccatctctacctgatgaagactaccatcaagagacacccccgccccccagggcacctagagccactgaccctagccaacagctcaggcgggctgggcccaggctcagaactctgtcctggctatgtacactgtggggtgctctgggctttttgaggctgtgtgattcaccctggggccttcgttcagagcatggtgtaggagcagacagacaaacaccatcccttgcagacaggcactctgagggctattctcttgcaaagataactaagcaccaggccagtaatgggatcctcagactgggcccagaaaaccactctagggaagttcagggtaggctctctgcaccccctcctcctaatcccgtctccttagtgtctttccgccagcacaggaatgggggaggggtgggtgacgaggatgaacaccggagtccctggaggaagggaagcagggtatctccatctgaggctctgtctttgaggagaggtggagagctggggaagtcttgtgtgaggggattggggctcaggagggggttggggagcaggaagttgtccccaggggagccatcctggcccattcaagggttgagtacttgtttagggttagagctgccccctctggggaccaggattgtccagccaaggccattgtcctgcccccttcccccagtccctcccaggcccctttgaacctgaagtcagatatttcttctctctacccacctcccacccgttgggtttctccacccaggaactaggctggaagcctgggatgaggaggtggggggagggagaactgagaatcttgaggaaagaggccccggccttaactgtgaggggatggagcctgggtgcaggtcttatgggggttggggggtggttagtgtctaatctaccaacctggacaacacaagatggaatactgtgctctgaaaacgcagagccagcacttctctggggtctctggggacatatctggttggggctcggggtcccatggtgtagagcctctaaactctggaggactggaggtgcaatggctgtcttgtcctggccttggacatgggctgaaatactgggttcacccatatctaggactctagacgggtgggtaagcaagaactgaggagtggccccagaaataattggcacacgaacattcaatggatgttttaggctctccagaggatggctgagtgggctgtaaggacaggccgagagggtgcagtgccaacaggctttgtggtgcgatggggcatccgagcaactggtttgtgaggtgtccggtgacccaaggcaggggtgagaggaccttgaaggttgaaaatgaaggcctcctggggtcccgtcctaagggttgtcctgtccagacgtccccaacctccgtctggaagacacaggcagatagcgctcgcctcagtttctcccacccccacagctctgctcctccacccacccagggggcggggccagaggtcaaggctagagggtgggattggggagggagaggtgaaaccgtccctaggtgagccgtctttccaccaggcccccggctcggggtgcccaccttccccatggtgagcaagggcgaggagctgttcaccggggtggtgcccatcctggtcgagctggacggcgacgtaaacggccacaagttcagcgtgtccggcgagggcgagggcgatgccacctacggcaagctgaccctgaagttcatctgcaccaccggcaagctgcccgtgccctggcccaccctcgtgaccaccctgacctacggcgtgcagtgcttcagccgctaccccgaccacatgaagcagcacgacttcttcaagtccgccatgcccgaaggctacgtccaggagcgcaccatcttcttcaaggacgacggcaactacaagacccgcgccgaggtgaagttcgagggcgacaccctggtgaaccgcatcgagctgaagggcatcgacttcaaggaggacggcaacatcctggggcacaagctggagtacaactacaacagccacaacgtctatatcatggccgacaagcagaagaacggcatcaaggtgaacttcaagatccgccacaacatcgaggacggcagcgtgcagctcgccgaccactaccagcagaacacccccatcggcgacggccccgtgctgctgcccgacaaccactacctgagcacccagtccgccctgagcaaagaccccaacgagaagcgcgatcacatggtcctgctggagttcgtgaccgccgccgggatcactctcggcatggatgaactatacaagggcagcattgtcatcatcactgtggtagcagccgcagtcataatgggcactgcaggcctcagcacgtacctctataaccgccagcggaagatcaagaaatacagactacaacaggcccaaaaagggacccccatgaaaccgaacacacaagccacgcctccctgagcgccggttaggggcccgtttaaacccgctgatcagcctcgactgtgccttctagttgccagccatctgttgtttgcccctcccccgtgccttccttgaccctggaaggtgccactcccactgtcctttcctaataaaatgaggaaattgcatcgcattgtctgagtaggtgtcattctattctggggggtggggtggggcaggacagcaagggggaggattgggaagacaatagcaggcatgctggggatgcggtgggctctatggcggcgcgcctaaaagttttgttactttatagaagaaattttgagtttttgtttttttttaataaataaataaacataaataaattgtttgttgaatttattattagtatgtaagtgtaaatataataaaacttaatatctattcaaattaataaataaacctcgatatacagaccgataaaacacatgcgtcaattttacgcatgattatctttaacgtacgtcacaatatgattatctttctagggttaaggccggccaaaagggcgaattctgcagatatccatcacactggcggccgctcgagcatgcatctagagggcccaattcgccctatagtgagtcgtattacaattcactggccgtcgttttacaacgtcgtgactgggaaaaccctggcgttacccaacttaatcgccttgcagcacatccccctttcgccagctggcgtaatagcgaagaggcccgcaccgatcgcccttcccaacagttgcgcagcctgaatggcgaatggacgcgccctgtagcggcgcattaagcgcggcgggtgtggtggttacgcgcagcgtgaccgctacacttgccagcgccctagcgcccgctcctttcgctttcttcccttcctttctcgccacgttcgccggctttccccgtcaagctctaaatcgggggctccctttagggttccgatttagtgctttacggcacctcgaccccaaaaaacttgattagggtgatggttcacgtagtgggccatcgccctgatagacggtttttcgccctttgacgttggagtccacgttctttaatagtggactcttgttccaaactggaacaacactcaaccctatctcggtctattcttttgatttataagggattttgccgatttcggcctattggttaaaaaatgagctgatttaacaaaaatttaacgcgaattttaacaaaattcagggcgcaagggctgctaaaggaagcggaacacgtagaaagccagtccgcagaaacggtgctgaccccggatgaatgtcagctactgggctatctggacaagggaaaacgcaagcgcaaagagaaagcaggtagcttgcagtgggcttacatggcgatagctagactgggcggttttatggacagcaagcgaaccggaattgccagctggggcgccctctggtaaggttgggaagccctgcaaagtaaactggatggctttcttgccgccaaggatctgatggcgcaggggatcaagatctgatcaagagacaggatgaggatcgtttcgcatgattgaacaagatggattgcacgcaggttctccggccgcttgggtggagaggctattcggctatgactgggcacaacagacaatcggctgctctgatgccgccgtgttccggctgtcagcgcaggggcgcccggttctttttgtcaagaccgacctgtccggtgccctgaatgaactgcaggacgaggcagcgcggctatcgtggctggccacgacgggcgttccttgcgcagctgtgctcgacgttgtcactgaagcgggaagggactggctgctattgggcgaagtgccggggcaggatctcctgtcatcccaccttgctcctgccgagaaagtatccatcatggctgatgcaatgcggcggctgcatacgcttgatccggctacctgcccattcgaccaccaagcgaaacatcgcatcgagcgagcacgtactcggatggaagccggtcttgtcgatcaggatgatctggacgaagagcatcaggggctcgcgccagccgaactgttcgccaggctcaaggcgcgcatgcccgacggcgaggatctcgtcgtgacccatggcgatgcctgcttgccgaatatcatggtggaaaatggccgcttttctggattcatcgactgtggccggctgggtgtggcggaccgctatcaggacatagcgttggctacccgtgatattgctgaagagcttggcggcgaatgggctgaccgcttcctcgtgctttacggtatcgccgctcccgattcgcagcgcatcgccttctatcgccttcttgacgagttcttctgaattgaaaaaggaagagtatgagtattcaacatttccgtgtcgcccttattcccttttttgcggcattttgccttcctgtttttgctcacccagaaacgctggtgaaagtaaaagatgctgaagatcagttgggtgcacgagtgggttacatcgaactggatctcaacagcggtaagatccttgagagttttcgccccgaagaacgttttccaatgatgagcacttttaaagttctgctatgtggcgcggtattatcccgtattgacgccgggcaagagcaactcggtcgccgcatacactattctcagaatgacttggttgagtactcaccagtcacagaaaagcatcttacggatggcatgacagtaagagaattatgcagtgctgccataaccatgagtgataacactgcggccaacttacttctgacaacgatcggaggaccgaaggagctaaccgcttttttgcacaacatgggggatcatgtaactcgccttgatcgttgggaaccggagctgaatgaagccataccaaacgacgagcgtgacaccacgatgcctgtagcaatggcaacaacgttgcgcaaactattaactggcgaactacttactctagcttcccggcaacaattaatagactggatggaggcggataaagttgcaggaccacttctgcgctcggcccttccggctggctggtttattgctgataaatctggagccggtgagcgtgggtctcgcggtatcattgcagcactggggccagatggtaagccctcccgtatcgtagttatctacacgacggggagtcaggcaactatggatgaacgaaatagacagatcgctgagataggtgcctcactgattaagcattggtaactgtcagaccaagtttactcatatatactttagattgatttaaaacttcatttttaatttaaaaggatctaggtgaagatcctttttgataatctcatgaccaaaatcccttaacgtgagttttcgttccactgagcgtcagaccccgtagaaaagatcaaaggatcttcttgagatcctttttttctgcgcgtaatctgctgcttgcaaacaaaaaaaccaccgctaccagcggtggtttgtttgccggatcaagagctaccaactctttttccgaaggtaactggcttcagcagagcgcagataccaaatactgttcttctagtgtagccgtagttaggccaccacttcaagaactctgtagcaccgcctacatacctcgctctgctaatcctgttaccagtggctgctgccagtggcgataagtcgtgtcttaccgggttggactcaagacgatagttaccggataaggcgcagcggtcgggctgaacggggggttcgtgcacacagcccagcttggagcgaacgacctacaccgaactgagatacctacagcgtgagctatgagaaagcgccacgcttcccgaagggagaaaggcggacaggtatccggtaagcggcagggtcggaacaggagagcgcacgagggagcttccagggggaaacgcctggtatctttatagtcctgtcgggtttcgccacctctgacttgagcgtcgatttttgtgatgctcgtcaggggggcggagcctatggaaaaacgccagcaacgcggcctttttacggttcctggccttttgctggccttttgctcacatgttctttcctgcgttatcccctgattctgtggataaccgtattaccgcctttgagtgagctgataccgctcgccgcagccgaacgaccgagcgcagcgagtcagtgagcgaggaagcggaag

SEQ ID NO: 60 - DNA, 7605 bp, synthetic construct
  source 1..7605: mol_type = other DNA
agatcaaaggatcttcttgagatcctttttttctgcgcgtaatctgctgcttgcaaacaaaaaaaccaccgctaccagcggtggtttgtttgccggatcaagagctaccaactctttttccgaaggtaactggcttcagcagagcgcagataccaaatactgtccttctagtgtagccgtagttaggccaccacttcaagaactctgtagcaccgcctacatacctcgctctgctaatcctgttaccagtggctgctgccagtggcgataagtcgtgtcttaccgggttggactcaagacgatagttaccggataaggcgcagcggtcgggctgaacggggggttcgtgcacacagcccagcttggagcgaacgacctacaccgaactgagatacctacagcgtgagctatgagaaagcgccacgcttcccgaagggagaaaggcggacaggtatccggtaagcggcagggtcggaacaggagagcgcacgagggagcttccagggggaaacgcctggtatctttatagtcctgtcgggtttcgccacctctgacttgagcgtcgatttttgtgatgctcgtcaggggggcggagcctatggaaaaacgccagcaacgcggcctttttacggttcctggccttttgctggccttttgctcacatgttctttcctgcgttatcccctgattctgtggataaccgtattaccgcctttgagtgagctgataccgctcgccgcagccgaacgaccgagcgcagcgagtcagtgagcgaggaagcggaagagcgcccaatacgcaaaccgcctctccccgcgcgttggccgattcattaatgcagctggcacgacaggtttcccgactggaaagcgggcagtgagcgcaacgcaattaatgtgagttagctcactcattaggcaccccaggctttacactttatgcttccggctcgtatgttgtgtggaattgtgagcggataacaatttcacacaggaaacagctatgaccatgattacgccaagcgcgcaattaaccctcactaaagggaacaaaagctggagctccaccgcggggcgcgccgcagctagattaaccctagaaagatagtctgcgtaaaattgacgcatgcattcttgaaatattgctctctctttctaaatagcgcgaatccgtcgctgtgcatttaggacatctcagtcgccgcttggagctcccgtgaggcgtgcttgtcaatgcggtaagtgtcactgattttgaactataacaaccgcgtgagtcaaaatgacgcatgattatcttttacgtgacttttaagatttaactcatacgataattatattgttatttcgtgttctacttacgtgataacttattatatatatattttcttgttatagatgggaattcagacatgataagatacattgatgagtttggacaaaccacaactagaatgcagtgaaaaaaatgctttatttgtgaaatttgtgatgctattgctttatttgtaaccattataagctgcaataaacaagtttcgaggtcgagtgtcagtcctgctcctcggccacgaagtcgttacataacttacggtaaatggcccgcctggctgaccgcccaacgacccccgcccattgacgtcaataatgacgtatgttcccatagtaacgccaatagggactttccattgacgtcaatgggtggagtatttacggtaaactgcccacttggcagtacatcaagtgtatcatatgccaagtacgccccctattgacgtcaatgacggtaaatggcccgcctggcattatgcccagtacatgaccttatgggactttcctacttggcagtacatctacgtattagtcatcgctattaccatggtcgaggtgagccccacgttctgcttcactctccccatctcccccccctccccacccccaattttgtatttatttattttttaattattttgtgcagcgatgggggcggggggggggggggggcgcgcgccaggcggggcggggcggggcgaggggcggggcggggcgaggcggagaggtgcggcggcagccaatcagagcggcgcgctccgaaagtttccttttatggcgaggcggcggcggcggcggccctataaaaagcgaagcgcgcggcgggcggggagtcgctgcgacgctgccttcgccccgtgccccgctccgccgccgcctcgcgccgcccgccccggctctgactgaccgcgttactcccacaggtgagcgggcgggacggcccttctcctccgggctgtaattagcgcttggtttaatgacggcttgtttcttttctgtggctgcgtgaaagccttgaggggctccgggagggccctttgtgcggggggagcggctcggggggtgcgtgcgtgtgtgtgtgcgtggggagcgccgcgtgcggctccgcgctgcccggcggctgtgagcgctgcgggcgcggcgcggggctttgtgcgctccgcagtgtgcgcgaggggagcgcggccgggggcggtgccccgcggtgcggggggggctgcgaggggaacaaaggctgcgtgcggggtgtgtgcgtgggggggtgagcagggggtgtgggcgcgtcggtcgggctgcaaccccccctgcacccccctccccgagttgctgagcacggcccggcttcgggtgcggggctccgtacggggcgtggcgcggggctcgccgtgccgggcggggggtggcggcaggtgggggtgccgggcggggcggggccgcctcgggccggggagggctcgggggaggggcgcggcggcccccggagcgccggcggctgtcgaggcgcggcgagccgcagccattgccttttatggtaatcgtgcgagagggcgcagggacttcctttgtcccaaatctgtgcggagccgaaatctgggaggcgccgccgcaccccctctagcgggcgcggggcgaagcggtgcggcgccggcaggaaggaaatgggcggggagggccttcgtgcgtcgccgcgccgccgtccccttctccctctccagcctcggggctgtccgcggggggacggctgccttcgggggggacggggcagggcggggttcggcttctggcgtgtgaccggcggctctagagcctctgctaaccatgttcatgccttcttctttttcctacaggcacctgtgattgcctcgggagttgaaatacacccagattgccaccatgaccgagtacaagcccacggtgcgcctcgccacccgcgacgacgtccccagggccgtacgcaccctcgccgccgcgttcgccgactaccccgccacgcgccacaccgtcgatccggaccgccacatcgagcgggtcaccgagctgcaagaactcttcctcacgcgcgtcgggctcgacatcggcaaggtgtgggtcgcggacgacggcgccgcggtggcggtctggaccacgccggagagcgtcgaagcgggggcggtgttcgccgagatcggcccgcgcatggccgagttgagcggttcccggctggccgcgcagcaacagatggaaggcctcctggcgccgcaccggcccaaggagcccgcgtggttcctggccaccgtcggcgtctcgcccgaccaccagggcaagggtctgggcagcgccgtcgtgctccccggagtggaggcggccgagcgcgccggggtgcccgccttcctggagacctccgcgccccgcaacctccccttctacgagcggctcggcttcaccgtcaccgccgacgtcgaggtgcccgaaggaccgcgcacctggtgcatgacccgcaagcccggtgccggcggcgggtccggaggagagggcagaggaagtctcctaacatgcggtgacgtggaggagaatcctggcccaatggcctcaccgttgacccgctttctgtcgctgaacctgctgctgctgggtgagtcgattatcctggggagtggagaagctactagtatggtgagcaagggcgaggagctgttcaccggggtggtgcccatcctggtcgagctggacggcgacgtaaacggccacaagttcagcgtgtccggcgagggcgagggcgatgccacctacggcaagctgaccctgaagttcatctgcaccaccggcaagctgcccgtgccctggcccaccctcgtgaccaccctgacctacggcgtgcagtgcttcagccgctaccccgaccacatgaagcagcacgacttcttcaagtccgccatgcccgaaggctacgtccaggagcgcaccatcttcttcaaggacgacggcaactacaagacccgcgccgaggtgaagttcgagggcgacaccctggtgaaccgcatcgagctgaagggcatcgacttcaaggaggacggcaacatcctggggcacaagctggagtacaactacaacagccacaacgtctatatcatggccgacaagcagaagaacggcatcaaggtgaacttcaagatccgccacaacatcgaggacggcagcgtgcagctcgccgaccactaccagcagaacacccccatcggcgacggccccgtgctgctgcccgacaaccactacctgagcacccagtccgccctgagcaaagaccccaacgagaagcgcgatcacatggtcctgctggagttcgtgaccgccgccgggatcactctcggcatggatgaactatacaagactagtaagccacaggcacccgaactccgaatctttccaaagaaaatggacgccgaacttggtcagaaggtggacctggtatgtgaagtgttggggtccgtttcgcaaggatgctcttggctcttccagaactccagctccaaactcccccagcccaccttcgttgtctatatggcttcatcccacaacaagataacgtgggacgagaagctgaattcgtcgaaactgttttctgccatgagggacacgaataataagtacgttctcaccctgaacaagttcagcaaggaaaacgaaggctactatttctgctcagtcatcagcaactcggtgatgtacttcagttctgtcgtgccagtccttcagaaagtgaactctactactaccaagccagtgctgcgaactccctcacctgtgcaccctaccgggacatctcagccccagagaccagaagattgtcggccccgtggctcagtgaaggggaccggattggacttcgcctgtgatatttacatctgggcacccttggccggaatctgcgtggcccttctgctgtccttgatcatcactctcatctgctaccacagccgcggatccacctaattaccaatagtcggcggttatcagcggaccctacgaagttgcggccgcgattaaaaaacctcccacacctccccctgaacctgaaacataaaatgaatgcaattgttgttgttaacttgtttattgcagcttataatggttacaaataaagcaatagcatcacaaatttcacaaataaagcatttttttcactgcattctagttgtggtttgtccaaactcatcaatgtatcttaaggaattcgataaaagttttgttactttatagaagaaattttgagtttttgtttttttttaataaataaataaacataaataaattgtttgttgaatttattattagtatgtaagtgtaaatataataaaacttaatatctattcaaattaataaataaacctcgatatacagaccgataaaacacatgcgtcaattttacgcatgattatctttaacgtacgtcacaatatgattatctttctagggttaatctagctgcggcgcgccggtacccaattcgccctatagtgagtcgtattacgcgcgctcactggccgtcgttttacaacgtcgtgactgggaaaaccctggcgttacccaacttaatcgccttgcagcacatccccctttcgccagctggcgtaatagcgaagaggcccgcaccgatcgcccttcccaacagttgcgcagcctgaatggcgaatgggacgcgccctgtagcggcgcattaagcgcggcgggtgtggtggttacgcgcagcgtgaccgctacacttgccagcgccctagcgcccgctcctttcgctttcttcccttcctttctcgccacgttcgccggctttccccgtcaagctctaaatcgggggctccctttagggttccgatttagtgctttacggcacctcgaccccaaaaaacttgattagggtgatggttcacgtagtgggccatcgccctgatagacggtttttcgccctttgacgttggagtccacgttctttaatagtggactcttgttccaaactggaacaacactcaaccctatctcggtctattcttttgatttataagggattttgccgatttcggcctattggttaaaaaatgagctgatttaacaaaaatttaacgcgaattttaacaaaatattaacgcttacaatttaggtggcacttttcggggaaatgtgcgcggaacccctatttgtttatttttctaaatacattcaaatatgtatccgctcatgagacaataaccctgataaatgcttcaataatattgaaaaaggaagagtatgagtattcaacatttccgtgtcgcccttattcccttttttgcggcattttgccttcctgtttttgctcacccagaaacgctggtgaaagtaaaagatgctgaagatcagttgggtgcacgagtgggttacatcgaactggatctcaacagcggtaagatccttgagagttttcgccccgaagaacgttttccaatgatgagcacttttaaagttctgctatgtggcgcggtattatcccgtattgacgccgggcaagagcaactcggtcgccgcatacactattctcagaatgacttggttgagtactcaccagtcacagaaaagcatcttacggatggcatgacagtaagagaattatgcagtgctgccataaccatgagtgataacactgcggccaacttacttctgacaacgatcggaggaccgaaggagctaaccgcttttttgcacaacatgggggatcatgtaactcgccttgatcgttgggaaccggagctgaatgaagccataccaaacgacgagcgtgacaccacgatgcctgtagcaatggcaacaacgttgcgcaaactattaactggcgaactacttactctagcttcccggcaacaattaatagactggatggaggcggataaagttgcaggaccacttctgcgctcggcccttccggctggctggtttattgctgataaatctggagccggtgagcgtgggtctcgcggtatcattgcagcactggggccagatggtaagccctcccgtatcgtagttatctacacgacggggagtcaggcaactatggatgaacgaaatagacagatcgctgagataggtgcctcactgattaagcattggtaactgtcagaccaagtttactcatatatactttagattgatttaaaacttcatttttaatttaaaaggatctaggtgaagatcctttttgataatctcatgaccaaaatcccttaacgtgagttttcgttccactgagcgtcagaccccgtagaaa

SEQ ID NO: 61 - DNA, 7110 bp, synthetic construct
  source 1..7110: mol_type = other DNA
agatcaaaggatcttcttgagatcctttttttctgcgcgtaatctgctgcttgcaaacaaaaaaaccaccgctaccagcggtggtttgtttgccggatcaagagctaccaactctttttccgaaggtaactggcttcagcagagcgcagataccaaatactgtccttctagtgtagccgtagttaggccaccacttcaagaactctgtagcaccgcctacatacctcgctctgctaatcctgttaccagtggctgctgccagtggcgataagtcgtgtcttaccgggttggactcaagacgatagttaccggataaggcgcagcggtcgggctgaacggggggttcgtgcacacagcccagcttggagcgaacgacctacaccgaactgagatacctacagcgtgagctatgagaaagcgccacgcttcccgaagggagaaaggcggacaggtatccggtaagcggcagggtcggaacaggagagcgcacgagggagcttccagggggaaacgcctggtatctttatagtcctgtcgggtttcgccacctctgacttgagcgtcgatttttgtgatgctcgtcaggggggcggagcctatggaaaaacgccagcaacgcggcctttttacggttcctggccttttgctggccttttgctcacatgttctttcctgcgttatcccctgattctgtggataaccgtattaccgcctttgagtgagctgataccgctcgccgcagccgaacgaccgagcgcagcgagtcagtgagcgaggaagcggaagagcgcccaatacgcaaaccgcctctccccgcgcgttggccgattcattaatgcagctggcacgacaggtttcccgactggaaagcgggcagtgagcgcaacgcaattaatgtgagttagctcactcattaggcaccccaggctttacactttatgcttccggctcgtatgttgtgtggaattgtgagcggataacaatttcacacaggaaacagctatgaccatgattacgccaagcgcgcaattaaccctcactaaagggaacaaaagctggagctccaccgcggggcgcgccgcagctagattaaccctagaaagatagtctgcgtaaaattgacgcatgcattcttgaaatattgctctctctttctaaatagcgcgaatccgtcgctgtgcatttaggacatctcagtcgccgcttggagctcccgtgaggcgtgcttgtcaatgcggtaagtgtcactgattttgaactataacaaccgcgtgagtcaaaatgacgcatgattatcttttacgtgacttttaagatttaactcatacgataattatattgttatttcgtgttctacttacgtgataacttattatatatatattttcttgttatagatgggaattcagacatgataagatacattgatgagtttggacaaaccacaactagaatgcagtgaaaaaaatgctttatttgtgaaatttgtgatgctattgctttatttgtaaccattataagctgcaataaacaagtttcgaggtcgagtgtcagtcctgctcctcggccacgaagtcgttacataacttacggtaaatggcccgcctggctgaccgcccaacgacccccgcccattgacgtcaataatgacgtatgttcccatagtaacgccaatagggactttccattgacgtcaatgggtggagtatttacggtaaactgcccacttggcagtacatcaagtgtatcatatgccaagtacgccccctattgacgtcaatgacggtaaatggcccgcctggcattatgcccagtacatgaccttatgggactttcctacttggcagtacatctacgtattagtcatcgctattaccatggtcgaggtgagccccacgttctgcttcactctccccatctcccccccctccccacccccaattttgtatttatttattttttaattattttgtgcagcgatgggggcggggggggggggggggcgcgcgccaggcggggcggggcggggcgaggggcggggcggggcgaggcggagaggtgcggcggcagccaatcagagcggcgcgctccgaaagtttccttttatggcgaggcggcggcggcggcggccctataaaaagcgaagcgcgcggcgggcggggagtcgctgcgacgctgccttcgccccgtgccccgctccgccgccgcctcgcgccgcccgccccggctctgactgaccgcgttactcccacaggtgagcgggcgggacggcccttctcctccgggctgtaattagcgcttggtttaatgacggcttgtttcttttctgtggctgcgtgaaagccttgaggggctccgggagggccctttgtgcggggggagcggctcggggggtgcgtgcgtgtgtgtgtgcgtggggagcgccgcgtgcggctccgcgctgcccggcggctgtgagcgctgcgggcgcggcgcggggctttgtgcgctccgcagtgtgcgcgaggggagcgcggccgggggcggtgccccgcggtgcggggggggctgcgaggggaacaaaggctgcgtgcggggtgtgtgcgtgggggggtgagcagggggtgtgggcgcgtcggtcgggctgcaaccccccctgcacccccctccccgagttgctgagcacggcccggcttcgggtgcggggctccgtacggggcgtggcgcggggctcgccgtgccgggcggggggtggcggcaggtgggggtgccgggcggggcggggccgcctcgggccggggagggctcgggggaggggcgcggcggcccccggagcgccggcggctgtcgaggcgcggcgagccgcagccattgccttttatggtaatcgtgcgagagggcgcagggacttcctttgtcccaaatctgtgcggagccgaaatctgggaggcgccgccgcaccccctctagcgggcgcggggcgaagcggtgcggcgccggcaggaaggaaatgggcggggagggccttcgtgcgtcgccgcgccgccgtccccttctccctctccagcctcggggctgtccgcggggggacggctgccttcgggggggacggggcagggcggggttcggcttctggcgtgtgaccggcggctctagagcctctgctaaccatgttcatgccttcttctttttcctacaggcacctgtgattgcctcgggagttgaaatacacccagattgccaccatgaccgagtacaagcccacggtgcgcctcgccacccgcgacgacgtccccagggccgtacgcaccctcgccgccgcgttcgccgactaccccgccacgcgccacaccgtcgatccggaccgccacatcgagcgggtcaccgagctgcaagaactcttcctcacgcgcgtcgggctcgacatcggcaaggtgtgggtcgcggacgacggcgccgcggtggcggtctggaccacgccggagagcgtcgaagcgggggcggtgttcgccgagatcggcccgcgcatggccgagttgagcggttcccggctggccgcgcagcaacagatggaaggcctcctggcgccgcaccggcccaaggagcccgcgtggttcctggccaccgtcggcgtctcgcccgaccaccagggcaagggtctgggcagcgccgtcgtgctccccggagtggaggcggccgagcgcgccggggtgcccgccttcctggagacctccgcgccccgcaacctccccttctacgagcggctcggcttcaccgtcaccgccgacgtcgaggtgcccgaaggaccgcgcacctggtgcatgacccgcaagcccggtgccggcggcgggtccggaggagagggcagaggaagtctcctaacatgcggtgacgtggaggagaatcctggcccaatggtagagatgctgccaactgtcgctgtgctggtcttggcagtgtccgtggttgccaaggataacaccacgctgcaggaattcgccaccatggtgagcaagggcgaggagctgttcaccggggtggtgcccatcctggtcgagctggacggcgacgtaaacggccacaagttcagcgtgtccggcgagggcgagggcgatgccacctacggcaagctgaccctgaagttcatctgcaccaccggcaagctgcccgtgccctggcccaccctcgtgaccaccctgacctacggcgtgcagtgcttcagccgctaccccgaccacatgaagcagcacgacttcttcaagtccgccatgcccgaaggctacgtccaggagcgcaccatcttcttcaaggacgacggcaactacaagacccgcgccgaggtgaagttcgagggcgacaccctggtgaaccgcatcgagctgaagggcatcgacttcaaggaggacggcaacatcctggggcacaagctggagtacaactacaacagccacaacgtctatatcatggccgacaagcagaagaacggcatcaaggtgaacttcaagatccgccacaacatcgaggacggcagcgtgcagctcgccgaccactaccagcagaacacccccatcggcgacggccccgtgctgctgcccgacaaccactacctgagcacccagtccgccctgagcaaagaccccaacgagaagcgcgatcacatggtcctgctggagttcgtgaccgccgccgggatcactctcggcatggatgaactataccaactcgagaatggcggcataagcctgctggttcagaacacatcctggatgctgctgctgctgctttccctctccctcctccaagccctggacttcatttctctgtaattaccaatagtcggcggttatcagcggaccctacgaagttgcggccgcgattaaaaaacctcccacacctccccctgaacctgaaacataaaatgaatgcaattgttgttgttaacttgtttattgcagcttataatggttacaaataaagcaatagcatcacaaatttcacaaataaagcatttttttcactgcattctagttgtggtttgtccaaactcatcaatgtatcttaaggaattcgataaaagttttgttactttatagaagaaattttgagtttttgtttttttttaataaataaataaacataaataaattgtttgttgaatttattattagtatgtaagtgtaaatataataaaacttaatatctattcaaattaataaataaacctcgatatacagaccgataaaacacatgcgtcaattttacgcatgattatctttaacgtacgtcacaatatgattatctttctagggttaatctagctgcggcgcgccggtacccaattcgccctatagtgagtcgtattacgcgcgctcactggccgtcgttttacaacgtcgtgactgggaaaaccctggcgttacccaacttaatcgccttgcagcacatccccctttcgccagctggcgtaatagcgaagaggcccgcaccgatcgcccttcccaacagttgcgcagcctgaatggcgaatgggacgcgccctgtagcggcgcattaagcgcggcgggtgtggtggttacgcgcagcgtgaccgctacacttgccagcgccctagcgcccgctcctttcgctttcttcccttcctttctcgccacgttcgccggctttccccgtcaagctctaaatcgggggctccctttagggttccgatttagtgctttacggcacctcgaccccaaaaaacttgattagggtgatggttcacgtagtgggccatcgccctgatagacggtttttcgccctttgacgttggagtccacgttctttaatagtggactcttgttccaaactggaacaacactcaaccctatctcggtctattcttttgatttataagggattttgccgatttcggcctattggttaaaaaatgagctgatttaacaaaaatttaacgcgaattttaacaaaatattaacgcttacaatttaggtggcacttttcggggaaatgtgcgcggaacccctatttgtttatttttctaaatacattcaaatatgtatccgctcatgagacaataaccctgataaatgcttcaataatattgaaaaaggaagagtatgagtattcaacatttccgtgtcgcccttattcccttttttgcggcattttgccttcctgtttttgctcacccagaaacgctggtgaaagtaaaagatgctgaagatcagttgggtgcacgagtgggttacatcgaactggatctcaacagcggtaagatccttgagagttttcgccccgaagaacgttttccaatgatgagcacttttaaagttctgctatgtggcgcggtattatcccgtattgacgccgggcaagagcaactcggtcgccgcatacactattctcagaatgacttggttgagtactcaccagtcacagaaaagcatcttacggatggcatgacagtaagagaattatgcagtgctgccataaccatgagtgataacactgcggccaacttacttctgacaacgatcggaggaccgaaggagctaaccgcttttttgcacaacatgggggatcatgtaactcgccttgatcgttgggaaccggagctgaatgaagccataccaaacgacgagcgtgacaccacgatgcctgtagcaatggcaacaacgttgcgcaaactattaactggcgaactacttactctagcttcccggcaacaattaatagactggatggaggcggataaagttgcaggaccacttctgcgctcggcccttccggctggctggtttattgctgataaatctggagccggtgagcgtgggtctcgcggtatcattgcagcactggggccagatggtaagccctcccgtatcgtagttatctacacgacggggagtcaggcaactatggatgaacgaaatagacagatcgctgagataggtgcctcactgattaagcattggtaactgtcagaccaagtttactcatatatactttagattgatttaaaacttcatttttaatttaaaaggatctaggtgaagatcctttttgataatctcatgaccaaaatcccttaacgtgagttttcgttccactgagcgtcagaccccgtagaaa

SEQ ID NO: 62 - DNA, 6921 bp, synthetic construct
  source 1..6921: mol_type = other DNA
cgttacataacttacggtaaatggcccgcctggctgaccgcccaacgacccccgcccattgacgtcaataatgacgtatgttcccatagtaacgccaatagggactttccattgacgtcaatgggtggagtatttacggtaaactgcccacttggcagtacatcaagtgtatcatatgccaagtacgccccctattgacgtcaatgacggtaaatggcccgcctggcattatgcccagtacatgaccttatgggactttcctacttggcagtacatctacgtattagtcatcgctattaccatggtcgaggtgagccccacgttctgcttcactctccccatctcccccccctccccacccccaattttgtatttatttattttttaattattttgtgcagcgatgggggcggggggggggggggggcgcgcgccaggcggggcggggcggggcgaggggcggggcggggcgaggcggagaggtgcggcggcagccaatcagagcggcgcgctccgaaagtttccttttatggcgaggcggcggcggcggcggccctataaaaagcgaagcgcgcggcgggcggggagtcgctgcgacgctgccttcgccccgtgccccgctccgccgccgcctcgcgccgcccgccccggctctgactgaccgcgttactcccacaggtgagcgggcgggacggcccttctcctccgggctgtaattagcgcttggtttaatgacggcttgtttcttttctgtggctgcgtgaaagccttgaggggctccgggagggccctttgtgcggggggagcggctcggggggtgcgtgcgtgtgtgtgtgcgtggggagcgccgcgtgcggctccgcgctgcccggcggctgtgagcgctgcgggcgcggcgcggggctttgtgcgctccgcagtgtgcgcgaggggagcgcggccgggggcggtgccccgcggtgcggggggggctgcgaggggaacaaaggctgcgtgcggggtgtgtgcgtgggggggtgagcagggggtgtgggcgcgtcggtcgggctgcaaccccccctgcacccccctccccgagttgctgagcacggcccggcttcgggtgcggggctccgtacggggcgtggcgcggggctcgccgtgccgggcggggggtggcggcaggtgggggtgccgggcggggcggggccgcctcgggccggggagggctcgggggaggggcgcggcggcccccggagcgccggcggctgtcgaggcgcggcgagccgcagccattgccttttatggtaatcgtgcgagagggcgcagggacttcctttgtcccaaatctgtgcggagccgaaatctgggaggcgccgccgcaccccctctagcgggcgcggggcgaagcggtgcggcgccggcaggaaggaaatgggcggggagggccttcgtgcgtcgccgcgccgccgtccccttctccctctccagcctcggggctgtccgcggggggacggctgccttcgggggggacggggcagggcggggttcggcttctggcgtgtgaccggcggctctagagcctctgctaaccatgttcatgccttcttctttttcctacaggcacctgtgattgcctcgggagttgaaatacacccagattgccaccatgagatctgatccaaaaaagaagagaaaggtagatccaaaaaagaagagaaaggtagatccaaaaaagaagagaaaggtcatggtgagcgtgatcaagcccgagatgaagatgaggtactacatggacggctccgtcaatgggcatgagttcacaatcgagggtgagggcacaggcagaccttacgagggacatcaggagatgacactgcgcgtcacaatggccaagggcgggccaatgcctttcgccttcgacctggtgtcccacgtgttctgttacggccacagaccttttactaaatatccagaagagatcccagactatttcaagcaggcctttcctgagggcctgtcctgggagaggtccctggagttcgaggacggcggctccgcctccgtgagcgcccacatcagcctgaggggcaacaccttctaccacaagtccaagttcaccggcgtgaacttccccgccgacggccccatcatgcagaaccagagcgtggactgggagccctccaccgagaagatcaccgccagcgacggcgtgctgaagggcgacgtgaccatgtacctgaagctggagggcggcggcaaccacaagtgccagttcaagaccacctacaaggccgccaagaagatcctgaagatgcccggcagccactacatcagccacaggctggtgaggaagaccgagggcaacatcaccgagctggtggaggacgccgtggcccactccgccacgaacttctctctgttaaagcaagcaggagacgtggaagaaaaccccggtcctatgaccgagtacaagcccacggtgcgcctcgccacccgcgacgacgtccccagggccgtacgcaccctcgccgccgcgttcgccgactaccccgccacgcgccacaccgtcgatccggaccgccacatcgagcgggtcaccgagctgcaagaactcttcctcacgcgcgtcgggctcgacatcggcaaggtgtgggtcgcggacgacggcgccgcggtggcggtctggaccacgccggagagcgtcgaagcgggggcggtgttcgccgagatcggcccgcgcatggccgagttgagcggttcccggctggccgcgcagcaacagatggaaggcctcctggcgccgcaccggcccaaggagcccgcgtggttcctggccaccgtcggagtctcgcccgaccaccagggcaagggtctgggcagcgccgtcgtgctccccggagtggaggcggccgagcgcgccggggtgcccgccttcctggagacctccgcgccccgcaacctccccttctacgagcggctcggcttcaccgtcaccgccgacgtcgaggtgcccgaaggaccgcgcacctggtgcatgacccgcaagcccggtgcctaattaccaatagtcggcggttatcagcggaccctacgaagttgcggccgcgattaaaaaacctcccacacctccccctgaacctgaaacataaaatgaatgcaattgttgttgttaacttgtttattgcagcttataatggttacaaataaagcaatagcatcacaaatttcacaaataaagcatttttttcactgcattctagttgtggtttgtccaaactcatcaatgtatcttaaggaattcgataaaagttttgttactttatagaagaaattttgagtttttgtttttttttaataaataaataaacataaataaattgtttgttgaatttattattagtatgtaagtgtaaatataataaaacttaatatctattcaaattaataaataaacctcgatatacagaccgataaaacacatgcgtcaattttacgcatgattatctttaacgtacgtcacaatatgattatctttctagggttaatctagctgcggcgcgccggtacccaattcgccctatagtgagtcgtattacgcgcgctcactggccgtcgttttacaacgtcgtgactgggaaaaccctggcgttacccaacttaatcgccttgcagcacatccccctttcgccagctggcgtaatagcgaagaggcccgcaccgatcgcccttcccaacagttgcgcagcctgaatggcgaatgggacgcgccctgtagcggcgcattaagcgcggcgggtgtggtggttacgcgcagcgtgaccgctacacttgccagcgccctagcgcccgctcctttcgctttcttcccttcctttctcgccacgttcgccggctttccccgtcaagctctaaatcgggggctccctttagggttccgatttagtgctttacggcacctcgaccccaaaaaacttgattagggtgatggttcacgtagtgggccatcgccctgatagacggtttttcgccctttgacgttggagtccacgttctttaatagtggactcttgttccaaactggaacaacactcaaccctatctcggtctattcttttgatttataagggattttgccgatttcggcctattggttaaaaaatgagctgatttaacaaaaatttaacgcgaattttaacaaaatattaacgcttacaatttaggtggcacttttcggggaaatgtgcgcggaacccctatttgtttatttttctaaatacattcaaatatgtatccgctcatgagacaataaccctgataaatgcttcaataatattgaaaaaggaagagtatgagtattcaacatttccgtgtcgcccttattcccttttttgcggcattttgccttcctgtttttgctcacccagaaacgctggtgaaagtaaaagatgctgaagatcagttgggtgcacgagtgggttacatcgaactggatctcaacagcggtaagatccttgagagttttcgccccgaagaacgttttccaatgatgagcacttttaaagttctgctatgtggcgcggtattatcccgtattgacgccgggcaagagcaactcggtcgccgcatacactattctcagaatgacttggttgagtactcaccagtcacagaaaagcatcttacggatggcatgacagtaagagaattatgcagtgctgccataaccatgagtgataacactgcggccaacttacttctgacaacgatcggaggaccgaaggagctaaccgcttttttgcacaacatgggggatcatgtaactcgccttgatcgttgggaaccggagctgaatgaagccataccaaacgacgagcgtgacaccacgatgcctgtagcaatggcaacaacgttgcgcaaactattaactggcgaactacttactctagcttcccggcaacaattaatagactggatggaggcggataaagttgcaggaccacttctgcgctcggcccttccggctggctggtttattgctgataaatctggagccggtgagcgtgggtctcgcggtatcattgcagcactggggccagatggtaagccctcccgtatcgtagttatctacacgacggggagtcaggcaactatggatgaacgaaatagacagatcgctgagataggtgcctcactgattaagcattggtaactgtcagaccaagtttactcatatatactttagattgatttaaaacttcatttttaatttaaaaggatctaggtgaagatcctttttgataatctcatgaccaaaatcccttaacgtgagttttcgttccactgagcgtcagaccccgtagaaaagatcaaaggatcttcttgagatcctttttttctgcgcgtaatctgctgcttgcaaacaaaaaaaccaccgctaccagcggtggtttgtttgccggatcaagagctaccaactctttttccgaaggtaactggcttcagcagagcgcagataccaaatactgtccttctagtgtagccgtagttaggccaccacttcaagaactctgtagcaccgcctacatacctcgctctgctaatcctgttaccagtggctgctgccagtggcgataagtcgtgtcttaccgggttggactcaagacgatagttaccggataaggcgcagcggtcgggctgaacggggggttcgtgcacacagcccagcttggagcgaacgacctacaccgaactgagatacctacagcgtgagctatgagaaagcgccacgcttcccgaagggagaaaggcggacaggtatccggtaagcggcagggtcggaacaggagagcgcacgagggagcttccagggggaaacgcctggtatctttatagtcctgtcgggtttcgccacctctgacttgagcgtcgatttttgtgatgctcgtcaggggggcggagcctatggaaaaacgccagcaacgcggcctttttacggttcctggccttttgctggccttttgctcacatgttctttcctgcgttatcccctgattctgtggataaccgtattaccgcctttgagtgagctgataccgctcgccgcagccgaacgaccgagcgcagcgagtcagtgagcgaggaagcggaagagcgcccaatacgcaaaccgcctctccccgcgcgttggccgattcattaatgcagctggcacgacaggtttcccgactggaaagcgggcagtgagcgcaacgcaattaatgtgagttagctcactcattaggcaccccaggctttacactttatgcttccggctcgtatgttgtgtggaattgtgagcggataacaatttcacacaggaaacagctatgaccatgattacgccaagcgcgcaattaaccctcactaaagggaacaaaagctggagctccaccgcggggcgcgccgcagctagattaaccctagaaagatagtctgcgtaaaattgacgcatgcattcttgaaatattgctctctctttctaaatagcgcgaatccgtcgctgtgcatttaggacatctcagtcgccgcttggagctcccgtgaggcgtgcttgtcaatgcggtaagtgtcactgattttgaactataacaaccgcgtgagtcaaaatgacgcatgattatcttttacgtgacttttaagatttaactcatacgataattatattgttatttcgtgttctacttacgtgataacttattatatatatattttcttgttatagatgggaattcagacatgataagatacattgatgagtttggacaaaccacaactagaatgcagtgaaaaaaatgctttatttgtgaaatttgtgatgctattgctttatttgtaaccattataagctgcaataaacaagtttcgaggtcgagtgtcagtcctgctcctcggccacgaagt

SEQ ID NO: 63 - DNA, 8025 bp, synthetic construct
  source 1..8025: mol_type = other DNA
cgttacataacttacggtaaatggcccgcctggctgaccgcccaacgacccccgcccattgacgtcaataatgacgtatgttcccatagtaacgccaatagggactttccattgacgtcaatgggtggagtatttacggtaaactgcccacttggcagtacatcaagtgtatcatatgccaagtacgccccctattgacgtcaatgacggtaaatggcccgcctggcattatgcccagtacatgaccttatgggactttcctacttggcagtacatctacgtattagtcatcgctattaccatggtcgaggtgagccccacgttctgcttcactctccccatctcccccccctccccacccccaattttgtatttatttattttttaattattttgtgcagcgatgggggcggggggggggggggggcgcgcgccaggcggggcggggcggggcgaggggcggggcggggcgaggcggagaggtgcggcggcagccaatcagagcggcgcgctccgaaagtttccttttatggcgaggcggcggcggcggcggccctataaaaagcgaagcgcgcggcgggcggggagtcgctgcgacgctgccttcgccccgtgccccgctccgccgccgcctcgcgccgcccgccccggctctgactgaccgcgttactcccacaggtgagcgggcgggacggcccttctcctccgggctgtaattagcgcttggtttaatgacggcttgtttcttttctgtggctgcgtgaaagccttgaggggctccgggagggccctttgtgcggggggagcggctcggggggtgcgtgcgtgtgtgtgtgcgtggggagcgccgcgtgcggctccgcgctgcccggcggctgtgagcgctgcgggcgcggcgcggggctttgtgcgctccgcagtgtgcgcgaggggagcgcggccgggggcggtgccccgcggtgcggggggggctgcgaggggaacaaaggctgcgtgcggggtgtgtgcgtgggggggtgagcagggggtgtgggcgcgtcggtcgggctgcaaccccccctgcacccccctccccgagttgctgagcacggcccggcttcgggtgcggggctccgtacggggcgtggcgcggggctcgccgtgccgggcggggggtggcggcaggtgggggtgccgggcggggcggggccgcctcgggccggggagggctcgggggaggggcgcggcggcccccggagcgccggcggctgtcgaggcgcggcgagccgcagccattgccttttatggtaatcgtgcgagagggcgcagggacttcctttgtcccaaatctgtgcggagccgaaatctgggaggcgccgccgcaccccctctagcgggcgcggggcgaagcggtgcggcgccggcaggaaggaaatgggcggggagggccttcgtgcgtcgccgcgccgccgtccccttctccctctccagcctcggggctgtccgcggggggacggctgccttcgggggggacggggcagggcggggttcggcttctggcgtgtgaccggcggctctagagcctctgctaaccatgttcatgccttcttctttttcctacaggcacctgtgattgcctcgggagttgaaatacacccagattgccaccatgagatctgatccaaaaaagaagagaaaggtagatccaaaaaagaagagaaaggtagatccaaaaaagaagagaaaggtcatggtgagcgtgatcaagcccgagatgaagatgaggtactacatggacggctccgtcaatgggcatgagttcacaatcgagggtgagggcacaggcagaccttacgagggacatcaggagatgacactgcgcgtcacaatggccaagggcgggccaatgcctttcgccttcgacctggtgtcccacgtgttctgttacggccacagaccttttactaaatatccagaagagatcccagactatttcaagcaggcctttcctgagggcctgtcctgggagaggtccctggagttcgaggacggcggctccgcctccgtgagcgcccacatcagcctgaggggcaacaccttctaccacaagtccaagttcaccggcgtgaacttccccgccgacggccccatcatgcagaaccagagcgtggactgggagccctccaccgagaagatcaccgccagcgacggcgtgctgaagggcgacgtgaccatgtacctgaagctggagggcggcggcaaccacaagtgccagttcaagaccacctacaaggccgccaagaagatcctgaagatgcccggcagccactacatcagccacaggctggtgaggaagaccgagggcaacatcaccgagctggtggaggacgccgtggcccactccgccacgaacttctctctgttaaagcaagcaggagacgtggaagaaaaccccggtcctatgaccgagtacaagcccacggtgcgcctcgccacccgcgacgacgtccccagggccgtacgcaccctcgccgccgcgttcgccgactaccccgccacgcgccacaccgtcgatccggaccgccacatcgagcgggtcaccgagctgcaagaactcttcctcacgcgcgtcgggctcgacatcggcaaggtgtgggtcgcggacgacggcgccgcggtggcggtctggaccacgccggagagcgtcgaagcgggggcggtgttcgccgagatcggcccgcgcatggccgagttgagcggttcccggctggccgcgcagcaacagatggaaggcctcctggcgccgcaccggcccaaggagcccgcgtggttcctggccaccgtcggagtctcgcccgaccaccagggcaagggtctgggcagcgccgtcgtgctccccggagtggaggcggccgagcgcgccggggtgcccgccttcctggagacctccgcgccccgcaacctccccttctacgagcggctcggcttcaccgtcaccgccgacgtcgaggtgcccgaaggaccgcgcacctggtgcatgacccgcaagcccggtgccgggtccggaggagagggcagaggaagtctcctaacatgcggtgacgtggaggagaatcctggcccaatggcctcaccgttgacccgctttctgtcgctgaacctgctgctgctgggtgagtcgattatcctggggagtggagaagctactagtatggatcaagtccaactggtggagtctggtggcgctttggtgcagccaggtggctctctgcgtttgtcctgtgccgcttctggcttcccagtgaaccgctattccatgcgctggtatcgccaggctccaggcaaagagcgtgagtgggtagccggtatgtccagcgcgggtgatcgtagctcctatgaagactccgtgaagggccgtttcaccatcagccgtgacgatgcccgtaacacggtgtatctgcaaatgaacagcttgaaacctgaagatacggccgtgtattactgtaatgtgaacgtgggcttcgagtattggggccaaggcacccaggtcaccgtctccagcactagtaagccacaggcacccgaactccgaatctttccaaagaaaatggacgccgaacttggtcagaaggtggacctggtatgtgaagtgttggggtccgtttcgcaaggatgctcttggctcttccagaactccagctccaaactcccccagcccaccttcgttgtctatatggcttcatcccacaacaagataacgtgggacgagaagctgaattcgtcgaaactgttttctgccatgagggacacgaataataagtacgttctcaccctgaacaagttcagcaaggaaaacgaaggctactatttctgctcagtcatcagcaactcggtgatgtacttcagttctgtcgtgccagtccttcagaaagtgaactctactactaccaagccagtgctgcgaactccctcacctgtgcaccctaccgggacatctcagccccagagaccagaagattgtcggccccgtggctcagtgaaggggaccggattggacttcgcctgtgatatttacatctgggcacccttggccggaatctgcgtggcccttctgctgtccttgatcatcactctcatctgctaccacagccgcggatccacctaattaccaatagtcggcggttatcagcggaccctacgaagttgcggccgcgattaaaaaacctcccacacctccccctgaacctgaaacataaaatgaatgcaattgttgttgttaacttgtttattgcagcttataatggttacaaataaagcaatagcatcacaaatttcacaaataaagcatttttttcactgcattctagttgtggtttgtccaaactcatcaatgtatcttaaggaattcgataaaagttttgttactttatagaagaaattttgagtttttgtttttttttaataaataaataaacataaataaattgtttgttgaatttattattagtatgtaagtgtaaatataataaaacttaatatctattcaaattaataaataaacctcgatatacagaccgataaaacacatgcgtcaattttacgcatgattatctttaacgtacgtcacaatatgattatctttctagggttaatctagctgcggcgcgccggtacccaattcgccctatagtgagtcgtattacgcgcgctcactggccgtcgttttacaacgtcgtgactgggaaaaccctggcgttacccaacttaatcgccttgcagcacatccccctttcgccagctggcgtaatagcgaagaggcccgcaccgatcgcccttcccaacagttgcgcagcctgaatggcgaatgggacgcgccctgtagcggcgcattaagcgcggcgggtgtggtggttacgcgcagcgtgaccgctacacttgccagcgccctagcgcccgctcctttcgctttcttcccttcctttctcgccacgttcgccggctttccccgtcaagctctaaatcgggggctccctttagggttccgatttagtgctttacggcacctcgaccccaaaaaacttgattagggtgatggttcacgtagtgggccatcgccctgatagacggtttttcgccctttgacgttggagtccacgttctttaatagtggactcttgttccaaactggaacaacactcaaccctatctcggtctattcttttgatttataagggattttgccgatttcggcctattggttaaaaaatgagctgatttaacaaaaatttaacgcgaattttaacaaaatattaacgcttacaatttaggtggcacttttcggggaaatgtgcgcggaacccctatttgtttatttttctaaatacattcaaatatgtatccgctcatgagacaataaccctgataaatgcttcaataatattgaaaaaggaagagtatgagtattcaacatttccgtgtcgcccttattcccttttttgcggcattttgccttcctgtttttgctcacccagaaacgctggtgaaagtaaaagatgctgaagatcagttgggtgcacgagtgggttacatcgaactggatctcaacagcggtaagatccttgagagttttcgccccgaagaacgttttccaatgatgagcacttttaaagttctgctatgtggcgcggtattatcccgtattgacgccgggcaagagcaactcggtcgccgcatacactattctcagaatgacttggttgagtactcaccagtcacagaaaagcatcttacggatggcatgacagtaagagaattatgcagtgctgccataaccatgagtgataacactgcggccaacttacttctgacaacgatcggaggaccgaaggagctaaccgcttttttgcacaacatgggggatcatgtaactcgccttgatcgttgggaaccggagctgaatgaagccataccaaacgacgagcgtgacaccacgatgcctgtagcaatggcaacaacgttgcgcaaactattaactggcgaactacttactctagcttcccggcaacaattaatagactggatggaggcggataaagttgcaggaccacttctgcgctcggcccttccggctggctggtttattgctgataaatctggagccggtgagcgtgggtctcgcggtatcattgcagcactggggccagatggtaagccctcccgtatcgtagttatctacacgacggggagtcaggcaactatggatgaacgaaatagacagatcgctgagataggtgcctcactgattaagcattggtaactgtcagaccaagtttactcatatatactttagattgatttaaaacttcatttttaatttaaaaggatctaggtgaagatcctttttgataatctcatgaccaaaatcccttaacgtgagttttcgttccactgagcgtcagaccccgtagaaaagatcaaaggatcttcttgagatcctttttttctgcgcgtaatctgctgcttgcaaacaaaaaaaccaccgctaccagcggtggtttgtttgccggatcaagagctaccaactctttttccgaaggtaactggcttcagcagagcgcagataccaaatactgtccttctagtgtagccgtagttaggccaccacttcaagaactctgtagcaccgcctacatacctcgctctgctaatcctgttaccagtggctgctgccagtggcgataagtcgtgtcttaccgggttggactcaagacgatagttaccggataaggcgcagcggtcgggctgaacggggggttcgtgcacacagcccagcttggagcgaacgacctacaccgaactgagatacctacagcgtgagctatgagaaagcgccacgcttcccgaagggagaaaggcggacaggtatccggtaagcggcagggtcggaacaggagagcgcacgagggagcttccagggggaaacgcctggtatctttatagtcctgtcgggtttcgccacctctgacttgagcgtcgatttttgtgatgctcgtcaggggggcggagcctatggaaaaacgccagcaacgcggcctttttacggttcctggccttttgctggccttttgctcacatgttctttcctgcgttatcccctgattctgtggataaccgtattaccgcctttgagtgagctgataccgctcgccgcagccgaacgaccgagcgcagcgagtcagtgagcgaggaagcggaagagcgcccaatacgcaaaccgcctctccccgcgcgttggccgattcattaatgcagctggcacgacaggtttcccgactggaaagcgggcagtgagcgcaacgcaattaatgtgagttagctcactcattaggcaccccaggctttacactttatgcttccggctcgtatgttgtgtggaattgtgagcggataacaatttcacacaggaaacagctatgaccatgattacgccaagcgcgcaattaaccctcactaaagggaacaaaagctggagctccaccgcggggcgcgccgcagctagattaaccctagaaagatagtctgcgtaaaattgacgcatgcattcttgaaatattgctctctctttctaaatagcgcgaatccgtcgctgtgcatttaggacatctcagtcgccgcttggagctcccgtgaggcgtgcttgtcaatgcggtaagtgtcactgattttgaactataacaaccgcgtgagtcaaaatgacgcatgattatcttttacgtgacttttaagatttaactcatacgataattatattgttatttcgtgttctacttacgtgataacttattatatatatattttcttgttatagatgggaattcagacatgataagatacattgatgagtttggacaaaccacaactagaatgcagtgaaaaaaatgctttatttgtgaaatttgtgatgctattgctttatttgtaaccattataagctgcaataaacaagtttcgaggtcgagtgtcagtcctgctcctcggccacgaagt

SEQ ID NO: 64 - DNA, 7530 bp, synthetic construct
  source 1..7530: mol_type = other DNA
cgttacataacttacggtaaatggcccgcctggctgaccgcccaacgacccccgcccattgacgtcaataatgacgtatgttcccatagtaacgccaatagggactttccattgacgtcaatgggtggagtatttacggtaaactgcccacttggcagtacatcaagtgtatcatatgccaagtacgccccctattgacgtcaatgacggtaaatggcccgcctggcattatgcccagtacatgaccttatgggactttcctacttggcagtacatctacgtattagtcatcgctattaccatggtcgaggtgagccccacgttctgcttcactctccccatctcccccccctccccacccccaattttgtatttatttattttttaattattttgtgcagcgatgggggcggggggggggggggggcgcgcgccaggcggggcggggcggggcgaggggcggggcggggcgaggcggagaggtgcggcggcagccaatcagagcggcgcgctccgaaagtttccttttatggcgaggcggcggcggcggcggccctataaaaagcgaagcgcgcggcgggcggggagtcgctgcgacgctgccttcgccccgtgccccgctccgccgccgcctcgcgccgcccgccccggctctgactgaccgcgttactcccacaggtgagcgggcgggacggcccttctcctccgggctgtaattagcgcttggtttaatgacggcttgtttcttttctgtggctgcgtgaaagccttgaggggctccgggagggccctttgtgcggggggagcggctcggggggtgcgtgcgtgtgtgtgtgcgtggggagcgccgcgtgcggctccgcgctgcccggcggctgtgagcgctgcgggcgcggcgcggggctttgtgcgctccgcagtgtgcgcgaggggagcgcggccgggggcggtgccccgcggtgcggggggggctgcgaggggaacaaaggctgcgtgcggggtgtgtgcgtgggggggtgagcagggggtgtgggcgcgtcggtcgggctgcaaccccccctgcacccccctccccgagttgctgagcacggcccggcttcgggtgcggggctccgtacggggcgtggcgcggggctcgccgtgccgggcggggggtggcggcaggtgggggtgccgggcggggcggggccgcctcgggccggggagggctcgggggaggggcgcggcggcccccggagcgccggcggctgtcgaggcgcggcgagccgcagccattgccttttatggtaatcgtgcgagagggcgcagggacttcctttgtcccaaatctgtgcggagccgaaatctgggaggcgccgccgcaccccctctagcgggcgcggggcgaagcggtgcggcgccggcaggaaggaaatgggcggggagggccttcgtgcgtcgccgcgccgccgtccccttctccctctccagcctcggggctgtccgcggggggacggctgccttcgggggggacggggcagggcggggttcggcttctggcgtgtgaccggcggctctagagcctctgctaaccatgttcatgccttcttctttttcctacaggcacctgtgattgcctcgggagttgaaatacacccagattgccaccatgagatctgatccaaaaaagaagagaaaggtagatccaaaaaagaagagaaaggtagatccaaaaaagaagagaaaggtcatggtgagcgtgatcaagcccgagatgaagatgaggtactacatggacggctccgtcaatgggcatgagttcacaatcgagggtgagggcacaggcagaccttacgagggacatcaggagatgacactgcgcgtcacaatggccaagggcgggccaatgcctttcgccttcgacctggtgtcccacgtgttctgttacggccacagaccttttactaaatatccagaagagatcccagactatttcaagcaggcctttcctgagggcctgtcctgggagaggtccctggagttcgaggacggcggctccgcctccgtgagcgcccacatcagcctgaggggcaacaccttctaccacaagtccaagttcaccggcgtgaacttccccgccgacggccccatcatgcagaaccagagcgtggactgggagccctccaccgagaagatcaccgccagcgacggcgtgctgaagggcgacgtgaccatgtacctgaagctggagggcggcggcaaccacaagtgccagttcaagaccacctacaaggccgccaagaagatcctgaagatgcccggcagccactacatcagccacaggctggtgaggaagaccgagggcaacatcaccgagctggtggaggacgccgtggcccactccgccacgaacttctctctgttaaagcaagcaggagacgtggaagaaaaccccggtcctatgaccgagtacaagcccacggtgcgcctcgccacccgcgacgacgtccccagggccgtacgcaccctcgccgccgcgttcgccgactaccccgccacgcgccacaccgtcgatccggaccgccacatcgagcgggtcaccgagctgcaagaactcttcctcacgcgcgtcgggctcgacatcggcaaggtgtgggtcgcggacgacggcgccgcggtggcggtctggaccacgccggagagcgtcgaagcgggggcggtgttcgccgagatcggcccgcgcatggccgagttgagcggttcccggctggccgcgcagcaacagatggaaggcctcctggcgccgcaccggcccaaggagcccgcgtggttcctggccaccgtcggagtctcgcccgaccaccagggcaagggtctgggcagcgccgtcgtgctccccggagtggaggcggccgagcgcgccggggtgcccgccttcctggagacctccgcgccccgcaacctccccttctacgagcggctcggcttcaccgtcaccgccgacgtcgaggtgcccgaaggaccgcgcacctggtgcatgacccgcaagcccggtgccgggtccggaggagagggcagaggaagtctcctaacatgcggtgacgtggaggagaatcctggcccaatggtagagatgctgccaactgtcgctgtgctggtcttggcagtgtccgtggttgccaaggataacaccacgctgcaggaattcgccaccatgcaggttcaactggtggaaagcggcggtgctctggtacaaccgggcggtagtctgcgcctgagctgtgccgcaagcggtttcccagtcaaccgctactctatgcgttggtatcgccaggcgcctggtaaagaacgtgaatgggttgccggcatgagcagtgcgggcgatcgttctagttacgaggactctgttaaaggtcgttttacaattagccgtgatgatgcgcgcaataccgtgtatctgcaaatgaacagtctgaagccggaggacaccgcagtatattattgcaatgtcaacgtggggtttgaatattggggccaggggactcaggtgacggtgagctctcaactcgagaatggcggcataagcctgctggttcagaacacatcctggatgctgctgctgctgctttccctctccctcctccaagccctggacttcatttctctgtaattaccaatagtcggcggttatcagcggaccctacgaagttgcggccgcgattaaaaaacctcccacacctccccctgaacctgaaacataaaatgaatgcaattgttgttgttaacttgtttattgcagcttataatggttacaaataaagcaatagcatcacaaatttcacaaataaagcatttttttcactgcattctagttgtggtttgtccaaactcatcaatgtatcttaaggaattcgataaaagttttgttactttatagaagaaattttgagtttttgtttttttttaataaataaataaacataaataaattgtttgttgaatttattattagtatgtaagtgtaaatataataaaacttaatatctattcaaattaataaataaacctcgatatacagaccgataaaacacatgcgtcaattttacgcatgattatctttaacgtacgtcacaatatgattatctttctagggttaatctagctgcggcgcgccggtacccaattcgccctatagtgagtcgtattacgcgcgctcactggccgtcgttttacaacgtcgtgactgggaaaaccctggcgttacccaacttaatcgccttgcagcacatccccctttcgccagctggcgtaatagcgaagaggcccgcaccgatcgcccttcccaacagttgcgcagcctgaatggcgaatgggacgcgccctgtagcggcgcattaagcgcggcgggtgtggtggttacgcgcagcgtgaccgctacacttgccagcgccctagcgcccgctcctttcgctttcttcccttcctttctcgccacgttcgccggctttccccgtcaagctctaaatcgggggctccctttagggttccgatttagtgctttacggcacctcgaccccaaaaaacttgattagggtgatggttcacgtagtgggccatcgccctgatagacggtttttcgccctttgacgttggagtccacgttctttaatagtggactcttgttccaaactggaacaacactcaaccctatctcggtctattcttttgatttataagggattttgccgatttcggcctattggttaaaaaatgagctgatttaacaaaaatttaacgcgaattttaacaaaatattaacgcttacaatttaggtggcacttttcggggaaatgtgcgcggaacccctatttgtttatttttctaaatacattcaaatatgtatccgctcatgagacaataaccctgataaatgcttcaataatattgaaaaaggaagagtatgagtattcaacatttccgtgtcgcccttattcccttttttgcggcattttgccttcctgtttttgctcacccagaaacgctggtgaaagtaaaagatgctgaagatcagttgggtgcacgagtgggttacatcgaactggatctcaacagcggtaagatccttgagagttttcgccccgaagaacgttttccaatgatgagcacttttaaagttctgctatgtggcgcggtattatcccgtattgacgccgggcaagagcaactcggtcgccgcatacactattctcagaatgacttggttgagtactcaccagtcacagaaaagcatcttacggatggcatgacagtaagagaattatgcagtgctgccataaccatgagtgataacactgcggccaacttacttctgacaacgatcggaggaccgaaggagctaaccgcttttttgcacaacatgggggatcatgtaactcgccttgatcgttgggaaccggagctgaatgaagccataccaaacgacgagcgtgacaccacgatgcctgtagcaatggcaacaacgttgcgcaaactattaactggcgaactacttactctagcttcccggcaacaattaatagactggatggaggcggataaagttgcaggaccacttctgcgctcggcccttccggctggctggtttattgctgataaatctggagccggtgagcgtgggtctcgcggtatcattgcagcactggggccagatggtaagccctcccgtatcgtagttatctacacgacggggagtcaggcaactatggatgaacgaaatagacagatcgctgagataggtgcctcactgattaagcattggtaactgtcagaccaagtttactcatatatactttagattgatttaaaacttcatttttaatttaaaaggatctaggtgaagatcctttttgataatctcatgaccaaaatcccttaacgtgagttttcgttccactgagcgtcagaccccgtagaaaagatcaaaggatcttcttgagatcctttttttctgcgcgtaatctgctgcttgcaaacaaaaaaaccaccgctaccagcggtggtttgtttgccggatcaagagctaccaactctttttccgaaggtaactggcttcagcagagcgcagataccaaatactgtccttctagtgtagccgtagttaggccaccacttcaagaactctgtagcaccgcctacatacctcgctctgctaatcctgttaccagtggctgctgccagtggcgataagtcgtgtcttaccgggttggactcaagacgatagttaccggataaggcgcagcggtcgggctgaacggggggttcgtgcacacagcccagcttggagcgaacgacctacaccgaactgagatacctacagcgtgagctatgagaaagcgccacgcttcccgaagggagaaaggcggacaggtatccggtaagcggcagggtcggaacaggagagcgcacgagggagcttccagggggaaacgcctggtatctttatagtcctgtcgggtttcgccacctctgacttgagcgtcgatttttgtgatgctcgtcaggggggcggagcctatggaaaaacgccagcaacgcggcctttttacggttcctggccttttgctggccttttgctcacatgttctttcctgcgttatcccctgattctgtggataaccgtattaccgcctttgagtgagctgataccgctcgccgcagccgaacgaccgagcgcagcgagtcagtgagcgaggaagcggaagagcgcccaatacgcaaaccgcctctccccgcgcgttggccgattcattaatgcagctggcacgacaggtttcccgactggaaagcgggcagtgagcgcaacgcaattaatgtgagttagctcactcattaggcaccccaggctttacactttatgcttccggctcgtatgttgtgtggaattgtgagcggataacaatttcacacaggaaacagctatgaccatgattacgccaagcgcgcaattaaccctcactaaagggaacaaaagctggagctccaccgcggggcgcgccgcagctagattaaccctagaaagatagtctgcgtaaaattgacgcatgcattcttgaaatattgctctctctttctaaatagcgcgaatccgtcgctgtgcatttaggacatctcagtcgccgcttggagctcccgtgaggcgtgcttgtcaatgcggtaagtgtcactgattttgaactataacaaccgcgtgagtcaaaatgacgcatgattatcttttacgtgacttttaagatttaactcatacgataattatattgttatttcgtgttctacttacgtgataacttattatatatatattttcttgttatagatgggaattcagacatgataagatacattgatgagtttggacaaaccacaactagaatgcagtgaaaaaaatgctttatttgtgaaatttgtgatgctattgctttatttgtaaccattataagctgcaataaacaagtttcgaggtcgagtgtcagtcctgctcctcggccacgaagt

SEQ ID NO: 65 - DNA, 5541 bp, synthetic construct
  source 1..5541: mol_type = other DNA
agatcaaaggatcttcttgagatcctttttttctgcgcgtaatctgctgcttgcaaacaaaaaaaccaccgctaccagcggtggtttgtttgccggatcaagagctaccaactctttttccgaaggtaactggcttcagcagagcgcagataccaaatactgtccttctagtgtagccgtagttaggccaccacttcaagaactctgtagcaccgcctacatacctcgctctgctaatcctgttaccagtggctgctgccagtggcgataagtcgtgtcttaccgggttggactcaagacgatagttaccggataaggcgcagcggtcgggctgaacggggggttcgtgcacacagcccagcttggagcgaacgacctacaccgaactgagatacctacagcgtgagctatgagaaagcgccacgcttcccgaagggagaaaggcggacaggtatccggtaagcggcagggtcggaacaggagagcgcacgagggagcttccagggggaaacgcctggtatctttatagtcctgtcgggtttcgccacctctgacttgagcgtcgatttttgtgatgctcgtcaggggggcggagcctatggaaaaacgccagcaacgcggcctttttacggttcctggccttttgctggccttttgctcacatgttctttcctgcgttatcccctgattctgtggataaccgtattaccgcctttgagtgagctgataccgctcgccgcagccgaacgaccgagcgcagcgagtcagtgagcgaggaagcggaagagcgcccaatacgcaaaccgcctctccccgcgcgttggccgattcattaatgcagctggcacgacaggtttcccgactggaaagcgggcagtgagcgcaacgcaattaatgtgagttagctcactcattaggcaccccaggctttacactttatgcttccggctcgtatgttgtgtggaattgtgagcggataacaatttcacacaggaaacagctatgaccatgattacgccaagcgcgcaattaaccctcactaaagggaacaaaagctggagctccaccgcggggcgcgccgcagctagattaaccctagaaagatagtctgcgtaaaattgacgcatgcattcttgaaatattgctctctctttctaaatagcgcgaatccgtcgctgtgcatttaggacatctcagtcgccgcttggagctcccgtgaggcgtgcttgtcaatgcggtaagtgtcactgattttgaactataacaaccgcgtgagtcaaaatgacgcatgattatcttttacgtgacttttaagatttaactcatacgataattatattgttatttcgtgttctacttacgtgataacttattatatatatattttcttgttatagatgggaattcagacatgataagatacattgatgagtttggacaaaccacaactagaatgcagtgaaaaaaatgctttatttgtgaaatttgtgatgctattgctttatttgtaaccattataagctgcaataaacaagtttcgaggtcgagtgtcagtcctgctcctcggccacgaagtcgttacataacttacggtaaatggcccgcctggctgaccgcccaacgacccccgcccattgacgtcaataatgacgtatgttcccatagtaacgccaatagggactttccattgacgtcaatgggtggagtatttacggtaaactgcccacttggcagtacatcaagtgtatcatatgccaagtacgccccctattgacgtcaatgacggtaaatggcccgcctggcattatgcccagtacatgaccttatgggactttcctacttggcagtacatctacgtattagtcatcgctattaccatggtcgaggtgagccccacgttctgcttcactctccccatctcccccccctccccacccccaattttgtatttatttattttttaattattttgtgcagcgatgggggcggggggggggggggggcgcgcgccaggcggggcggggcggggcgaggggcggggcggggcgaggcggagaggtgcggcggcagccaatcagagcggcgcgctccgaaagtttccttttatggcgaggcggcggcggcggcggccctataaaaagcgaagcgcgcggcgggcggggagtcgctgcgacgctgccttcgccccgtgccccgctccgccgccgcctcgcgccgcccgccccggctctgactgaccgcgttactcccacaggtgagcgggcgggacggcccttctcctccgggctgtaattagcgcttggtttaatgacggcttgtttcttttctgtggctgcgtgaaagccttgaggggctccgggagggccctttgtgcggggggagcggctcggggggtgcgtgcgtgtgtgtgtgcgtggggagcgccgcgtgcggctccgcgctgcccggcggctgtgagcgctgcgggcgcggcgcggggctttgtgcgctccgcagtgtgcgcgaggggagcgcggccgggggcggtgccccgcggtgcggggggggctgcgaggggaacaaaggctgcgtgcggggtgtgtgcgtgggggggtgagcagggggtgtgggcgcgtcggtcgggctgcaaccccccctgcacccccctccccgagttgctgagcacggcccggcttcgggtgcggggctccgtacggggcgtggcgcggggctcgccgtgccgggcggggggtggcggcaggtgggggtgccgggcggggcggggccgcctcgggccggggagggctcgggggaggggcgcggcggcccccggagcgccggcggctgtcgaggcgcggcgagccgcagccattgccttttatggtaatcgtgcgagagggcgcagggacttcctttgtcccaaatctgtgcggagccgaaatctgggaggcgccgccgcaccccctctagcgggcgcggggcgaagcggtgcggcgccggcaggaaggaaatgggcggggagggccttcgtgcgtcgccgcgccgccgtccccttctccctctccagcctcggggctgtccgcggggggacggctgccttcgggggggacggggcagggcggggttcggcttctggcgtgtgaccggcggctctagagcctctgctaaccatgttcatgccttcttctttttcctacaggcacctgtgattgcctcgggagttgaaatacacccagattgaattcgatatcaagcttttaccaatagtcggcggttatcagcggaccctacgaagttgcggccgcgattaaaaaacctcccacacctccccctgaacctgaaacataaaatgaatgcaattgttgttgttaacttgtttattgcagcttataatggttacaaataaagcaatagcatcacaaatttcacaaataaagcatttttttcactgcattctagttgtggtttgtccaaactcatcaatgtatcttaaggaattcgataaaagttttgttactttatagaagaaattttgagtttttgtttttttttaataaataaataaacataaataaattgtttgttgaatttattattagtatgtaagtgtaaatataataaaacttaatatctattcaaattaataaataaacctcgatatacagaccgataaaacacatgcgtcaattttacgcatgattatctttaacgtacgtcacaatatgattatctttctagggttaatctagctgcggcgcgccggtacccaattcgccctatagtgagtcgtattacgcgcgctcactggccgtcgttttacaacgtcgtgactgggaaaaccctggcgttacccaacttaatcgccttgcagcacatccccctttcgccagctggcgtaatagcgaagaggcccgcaccgatcgcccttcccaacagttgcgcagcctgaatggcgaatgggacgcgccctgtagcggcgcattaagcgcggcgggtgtggtggttacgcgcagcgtgaccgctacacttgccagcgccctagcgcccgctcctttcgctttcttcccttcctttctcgccacgttcgccggctttccccgtcaagctctaaatcgggggctccctttagggttccgatttagtgctttacggcacctcgaccccaaaaaacttgattagggtgatggttcacgtagtgggccatcgccctgatagacggtttttcgccctttgacgttggagtccacgttctttaatagtggactcttgttccaaactggaacaacactcaaccctatctcggtctattcttttgatttataagggattttgccgatttcggcctattggttaaaaaatgagctgatttaacaaaaatttaacgcgaattttaacaaaatattaacgcttacaatttaggtggcacttttcggggaaatgtgcgcggaacccctatttgtttatttttctaaatacattcaaatatgtatccgctcatgagacaataaccctgataaatgcttcaataatattgaaaaaggaagagtatgagtattcaacatttccgtgtcgcccttattcccttttttgcggcattttgccttcctgtttttgctcacccagaaacgctggtgaaagtaaaagatgctgaagatcagttgggtgcacgagtgggttacatcgaactggatctcaacagcggtaagatccttgagagttttcgccccgaagaacgttttccaatgatgagcacttttaaagttctgctatgtggcgcggtattatcccgtattgacgccgggcaagagcaactcggtcgccgcatacactattctcagaatgacttggttgagtactcaccagtcacagaaaagcatcttacggatggcatgacagtaagagaattatgcagtgctgccataaccatgagtgataacactgcggccaacttacttctgacaacgatcggaggaccgaaggagctaaccgcttttttgcacaacatgggggatcatgtaactcgccttgatcgttgggaaccggagctgaatgaagccataccaaacgacgagcgtgacaccacgatgcctgtagcaatggcaacaacgttgcgcaaactattaactggcgaactacttactctagcttcccggcaacaattaatagactggatggaggcggataaagttgcaggaccacttctgcgctcggcccttccggctggctggtttattgctgataaatctggagccggtgagcgtgggtctcgcggtatcattgcagcactggggccagatggtaagccctcccgtatcgtagttatctacacgacggggagtcaggcaactatggatgaacgaaatagacagatcgctgagataggtgcctcactgattaagcattggtaactgtcagaccaagtttactcatatatactttagattgatttaaaacttcatttttaatttaaaaggatctaggtgaagatcctttttgataatctcatgaccaaaatcccttaacgtgagttttcgttccactgagcgtcagaccccgtagaaa

SEQ ID NO: 66 - DNA, 7947 bp, synthetic construct
  source 1..7947: mol_type = other DNA
agatcaaaggatcttcttgagatcctttttttctgcgcgtaatctgctgcttgcaaacaaaaaaaccaccgctaccagcggtggtttgtttgccggatcaagagctaccaactctttttccgaaggtaactggcttcagcagagcgcagataccaaatactgtccttctagtgtagccgtagttaggccaccacttcaagaactctgtagcaccgcctacatacctcgctctgctaatcctgttaccagtggctgctgccagtggcgataagtcgtgtcttaccgggttggactcaagacgatagttaccggataaggcgcagcggtcgggctgaacggggggttcgtgcacacagcccagcttggagcgaacgacctacaccgaactgagatacctacagcgtgagctatgagaaagcgccacgcttcccgaagggagaaaggcggacaggtatccggtaagcggcagggtcggaacaggagagcgcacgagggagcttccagggggaaacgcctggtatctttatagtcctgtcgggtttcgccacctctgacttgagcgtcgatttttgtgatgctcgtcaggggggcggagcctatggaaaaacgccagcaacgcggcctttttacggttcctggccttttgctggccttttgctcacatgttctttcctgcgttatcccctgattctgtggataaccgtattaccgcctttgagtgagctgataccgctcgccgcagccgaacgaccgagcgcagcgagtcagtgagcgaggaagcggaagagcgcccaatacgcaaaccgcctctccccgcgcgttggccgattcattaatgcagctggcacgacaggtttcccgactggaaagcgggcagtgagcgcaacgcaattaatgtgagttagctcactcattaggcaccccaggctttacactttatgcttccggctcgtatgttgtgtggaattgtgagcggataacaatttcacacaggaaacagctatgaccatgattacgccaagcgcgcaattaaccctcactaaagggaacaaaagctggagctccaccgcggggcgcgccgcagctagattaaccctagaaagatagtctgcgtaaaattgacgcatgcattcttgaaatattgctctctctttctaaatagcgcgaatccgtcgctgtgcatttaggacatctcagtcgccgcttggagctcccgtgaggcgtgcttgtcaatgcggtaagtgtcactgattttgaactataacaaccgcgtgagtcaaaatgacgcatgattatcttttacgtgacttttaagatttaactcatacgataattatattgttatttcgtgttctacttacgtgataacttattatatatatattttcttgttatagatgggaattcagacatgataagatacattgatgagtttggacaaaccacaactagaatgcagtgaaaaaaatgctttatttgtgaaatttgtgatgctattgctttatttgtaaccattataagctgcaataaacaagtttcgaggtcgagtgtcagtcctgctcctcggccacgaagtcgttacataacttacggtaaatggcccgcctggctgaccgcccaacgacccccgcccattgacgtcaataatgacgtatgttcccatagtaacgccaatagggactttccattgacgtcaatgggtggagtatttacggtaaactgcccacttggcagtacatcaagtgtatcatatgccaagtacgccccctattgacgtcaatgacggtaaatggcccgcctggcattatgcccagtacatgaccttatgggactttcctacttggcagtacatctacgtattagtcatcgctattaccatggtcgaggtgagccccacgttctgcttcactctccccatctcccccccctccccacccccaattttgtatttatttattttttaattattttgtgcagcgatgggggcggggggggggggggggcgcgcgccaggcggggcggggcggggcgaggggcggggcggggcgaggcggagaggtgcggcggcagccaatcagagcggcgcgctccgaaagtttccttttatggcgaggcggcggcggcggcggccctataaaaagcgaagcgcgcggcgggcggggagtcgctgcgacgctgccttcgccccgtgccccgctccgccgccgcctcgcgccgcccgccccggctctgactgaccgcgttactcccacaggtgagcgggcgggacggcccttctcctccgggctgtaattagcgcttggtttaatgacggcttgtttcttttctgtggctgcgtgaaagccttgaggggctccgggagggccctttgtgcggggggagcggctcggggggtgcgtgcgtgtgtgtgtgcgtggggagcgccgcgtgcggctccgcgctgcccggcggctgtgagcgctgcgggcgcggcgcggggctttgtgcgctccgcagtgtgcgcgaggggagcgcggccgggggcggtgccccgcggtgcggggggggctgcgaggggaacaaaggctgcgtgcggggtgtgtgcgtgggggggtgagcagggggtgtgggcgcgtcggtcgggctgcaaccccccctgcacccccctccccgagttgctgagcacggcccggcttcgggtgcggggctccgtacggggcgtggcgcggggctcgccgtgccgggcggggggtggcggcaggtgggggtgccgggcggggcggggccgcctcgggccggggagggctcgggggaggggcgcggcggcccccggagcgccggcggctgtcgaggcgcggcgagccgcagccattgccttttatggtaatcgtgcgagagggcgcagggacttcctttgtcccaaatctgtgcggagccgaaatctgggaggcgccgccgcaccccctctagcgggcgcggggcgaagcggtgcggcgccggcaggaaggaaatgggcggggagggccttcgtgcgtcgccgcgccgccgtccccttctccctctccagcctcggggctgtccgcggggggacggctgccttcgggggggacggggcagggcggggttcggcttctggcgtgtgaccggcggctctagagcctctgctaaccatgttcatgccttcttctttttcctacaggcacctgtgattgcctcgggagttgaaatacacccagattgccaccatgaccgagtacaagcccacggtgcgcctcgccacccgcgacgacgtccccagggccgtacgcaccctcgccgccgcgttcgccgactaccccgccacgcgccacaccgtcgatccggaccgccacatcgagcgggtcaccgagctgcaagaactcttcctcacgcgcgtcgggctcgacatcggcaaggtgtgggtcgcggacgacggcgccgcggtggcggtctggaccacgccggagagcgtcgaagcgggggcggtgttcgccgagatcggcccgcgcatggccgagttgagcggttcccggctggccgcgcagcaacagatggaaggcctcctggcgccgcaccggcccaaggagcccgcgtggttcctggccaccgtcggcgtctcgcccgaccaccagggcaagggtctgggcagcgccgtcgtgctccccggagtggaggcggccgagcgcgccggggtgcccgccttcctggagacctccgcgccccgcaacctccccttctacgagcggctcggcttcaccgtcaccgccgacgtcgaggtgcccgaaggaccgcgcacctggtgcatgacccgcaagcccggtgccggcggcgggtccggaggagagggcagaggaagtctcctaacatgcggtgacgtggaggagaatcctggcccaatggcctcaccgttgacccgctttctgtcgctgaacctgctgctgctgggtgagtcgattatcctggggagtggagaagctactagtatggatcaagtccaactggtggagtctggtggcgctttggtgcagccaggtggctctctgcgtttgtcctgtgccgcttctggcttcccagtgaaccgctattccatgcgctggtatcgccaggctccaggcaaagagcgtgagtgggtagccggtatgtccagcgcgggtgatcgtagctcctatgaagactccgtgaagggccgtttcaccatcagccgtgacgatgcccgtaacacggtgtatctgcaaatgaacagcttgaaacctgaagatacggccgtgtattactgtaatgtgaacgtgggcttcgagtattggggccaaggcacccaggtcaccgtctccagcactagtaagccacaggcacccgaactccgaatctttccaaagaaaatggacgccgaacttggtcagaaggtggacctggtatgtgaagtgttggggtccgtttcgcaaggatgctcttggctcttccagaactccagctccaaactcccccagcccaccttcgttgtctatatggcttcatcccacaacaagataacgtgggacgagaagctgaattcgtcgaaactgttttctgccatgagggacacgaataataagtacgttctcaccctgaacaagttcagcaaggaaaacgaaggctactatttctgctcagtcatcagcaactcggtgatgtacttcagttctgtcgtgccagtccttcagaaagtgaactctactactaccaagccagtgctgcgaactccctcacctgtgcaccctaccgggacatctcagccccagagaccagaagattgtcggccccgtggctcagtgaaggggaccggattggacttcgcctgtgatatttacatctgggcacccttggccggaatctgcgtggcccttctgctgtccttgatcatcactctcatctgctaccacagccgcggatccaccatggtgagcaagggcgaggaggataacatggccatcatcaaggagttcatgcgcttcaaggtgcacatggagggctccgtgaacggccacgagttcgagatcgagggcgagggcgagggccgcccctacgagggcacccagaccgccaagctgaaggtgaccaagggtggccccctgcccttcgcctgggacatcctgtcccctcagttcatgtacggctccaaggcctacgtgaagcaccccgccgacatccccgactacttgaagctgtccttccccgagggcttcaagtgggagcgcgtgatgaacttcgaggacggcggcgtggtgaccgtgacccaggactcctccctgcaggacggcgagttcatctacaaggtgaagctgcgcggcaccaacttcccctccgacggccccgtaatgcagaagaagaccatgggctgggaggcctcctccgagcggatgtaccccgaggacggcgccctgaagggcgagatcaagcagaggctgaagctgaaggacggcggccactacgacgctgaggtcaagaccacctacaaggccaagaagcccgtgcagctgcccggcgcctacaacgtcaacatcaagttggacatcacctcccacaacgaggactacaccatcgtggaacagtacgaacgcgccgagggccgccactccaccggcggcatggacgagctgtacaagtaattaccaatagtcggcggttatcagcggaccctacgaagttgcggccgcgattaaaaaacctcccacacctccccctgaacctgaaacataaaatgaatgcaattgttgttgttaacttgtttattgcagcttataatggttacaaataaagcaatagcatcacaaatttcacaaataaagcatttttttcactgcattctagttgtggtttgtccaaactcatcaatgtatcttaaggaattcgataaaagttttgttactttatagaagaaattttgagtttttgtttttttttaataaataaataaacataaataaattgtttgttgaatttattattagtatgtaagtgtaaatataataaaacttaatatctattcaaattaataaataaacctcgatatacagaccgataaaacacatgcgtcaattttacgcatgattatctttaacgtacgtcacaatatgattatctttctagggttaatctagctgcggcgcgccggtacccaattcgccctatagtgagtcgtattacgcgcgctcactggccgtcgttttacaacgtcgtgactgggaaaaccctggcgttacccaacttaatcgccttgcagcacatccccctttcgccagctggcgtaatagcgaagaggcccgcaccgatcgcccttcccaacagttgcgcagcctgaatggcgaatgggacgcgccctgtagcggcgcattaagcgcggcgggtgtggtggttacgcgcagcgtgaccgctacacttgccagcgccctagcgcccgctcctttcgctttcttcccttcctttctcgccacgttcgccggctttccccgtcaagctctaaatcgggggctccctttagggttccgatttagtgctttacggcacctcgaccccaaaaaacttgattagggtgatggttcacgtagtgggccatcgccctgatagacggtttttcgccctttgacgttggagtccacgttctttaatagtggactcttgttccaaactggaacaacactcaaccctatctcggtctattcttttgatttataagggattttgccgatttcggcctattggttaaaaaatgagctgatttaacaaaaatttaacgcgaattttaacaaaatattaacgcttacaatttaggtggcacttttcggggaaatgtgcgcggaacccctatttgtttatttttctaaatacattcaaatatgtatccgctcatgagacaataaccctgataaatgcttcaataatattgaaaaaggaagagtatgagtattcaacatttccgtgtcgcccttattcccttttttgcggcattttgccttcctgtttttgctcacccagaaacgctggtgaaagtaaaagatgctgaagatcagttgggtgcacgagtgggttacatcgaactggatctcaacagcggtaagatccttgagagttttcgccccgaagaacgttttccaatgatgagcacttttaaagttctgctatgtggcgcggtattatcccgtattgacgccgggcaagagcaactcggtcgccgcatacactattctcagaatgacttggttgagtactcaccagtcacagaaaagcatcttacggatggcatgacagtaagagaattatgcagtgctgccataaccatgagtgataacactgcggccaacttacttctgacaacgatcggaggaccgaaggagctaaccgcttttttgcacaacatgggggatcatgtaactcgccttgatcgttgggaaccggagctgaatgaagccataccaaacgacgagcgtgacaccacgatgcctgtagcaatggcaacaacgttgcgcaaactattaactggcgaactacttactctagcttcccggcaacaattaatagactggatggaggcggataaagttgcaggaccacttctgcgctcggcccttccggctggctggtttattgctgataaatctggagccggtgagcgtgggtctcgcggtatcattgcagcactggggccagatggtaagccctcccgtatcgtagttatctacacgacggggagtcaggcaactatggatgaacgaaatagacagatcgctgagataggtgcctcactgattaagcattggtaactgtcagaccaagtttactcatatatactttagattgatttaaaacttcatttttaatttaaaaggatctaggtgaagatcctttttgataatctcatgaccaaaatcccttaacgtgagttttcgttccactgagcgtcagaccccgtagaaa

SEQ ID NO: 67 - DNA, 7449 bp, synthetic construct
  source 1..7449: mol_type = other DNA
agatcaaaggatcttcttgagatcctttttttctgcgcgtaatctgctgcttgcaaacaaaaaaaccaccgctaccagcggtggtttgtttgccggatcaagagctaccaactctttttccgaaggtaactggcttcagcagagcgcagataccaaatactgtccttctagtgtagccgtagttaggccaccacttcaagaactctgtagcaccgcctacatacctcgctctgctaatcctgttaccagtggctgctgccagtggcgataagtcgtgtcttaccgggttggactcaagacgatagttaccggataaggcgcagcggtcgggctgaacggggggttcgtgcacacagcccagcttggagcgaacgacctacaccgaactgagatacctacagcgtgagctatgagaaagcgccacgcttcccgaagggagaaaggcggacaggtatccggtaagcggcagggtcggaacaggagagcgcacgagggagcttccagggggaaacgcctggtatctttatagtcctgtcgggtttcgccacctctgacttgagcgtcgatttttgtgatgctcgtcaggggggcggagcctatggaaaaacgccagcaacgcggcctttttacggttcctggccttttgctggccttttgctcacatgttctttcctgcgttatcccctgattctgtggataaccgtattaccgcctttgagtgagctgataccgctcgccgcagccgaacgaccgagcgcagcgagtcagtgagcgaggaagcggaagagcgcccaatacgcaaaccgcctctccccgcgcgttggccgattcattaatgcagctggcacgacaggtttcccgactggaaagcgggcagtgagcgcaacgcaattaatgtgagttagctcactcattaggcaccccaggctttacactttatgcttccggctcgtatgttgtgtggaattgtgagcggataacaatttcacacaggaaacagctatgaccatgattacgccaagcgcgcaattaaccctcactaaagggaacaaaagctggagctccaccgcggggcgcgccgcagctagattaaccctagaaagatagtctgcgtaaaattgacgcatgcattcttgaaatattgctctctctttctaaatagcgcgaatccgtcgctgtgcatttaggacatctcagtcgccgcttggagctcccgtgaggcgtgcttgtcaatgcggtaagtgtcactgattttgaactataacaaccgcgtgagtcaaaatgacgcatgattatcttttacgtgacttttaagatttaactcatacgataattatattgttatttcgtgttctacttacgtgataacttattatatatatattttcttgttatagatgggaattcagacatgataagatacattgatgagtttggacaaaccacaactagaatgcagtgaaaaaaatgctttatttgtgaaatttgtgatgctattgctttatttgtaaccattataagctgcaataaacaagtttcgaggtcgagtgtcagtcctgctcctcggccacgaagtcgttacataacttacggtaaatggcccgcctggctgaccgcccaacgacccccgcccattgacgtcaataatgacgtatgttcccatagtaacgccaatagggactttccattgacgtcaatgggtggagtatttacggtaaactgcccacttggcagtacatcaagtgtatcatatgccaagtacgccccctattgacgtcaatgacggtaaatggcccgcctggcattatgcccagtacatgaccttatgggactttcctacttggcagtacatctacgtattagtcatcgctattaccatggtcgaggtgagccccacgttctgcttcactctccccatctcccccccctccccacccccaattttgtatttatttattttttaattattttgtgcagcgatgggggcggggggggggggggggcgcgcgccaggcggggcggggcggggcgaggggcggggcggggcgaggcggagaggtgcggcggcagccaatcagagcggcgcgctccgaaagtttccttttatggcgaggcggcggcggcggcggccctataaaaagcgaagcgcgcggcgggcggggagtcgctgcgacgctgccttcgccccgtgccccgctccgccgccgcctcgcgccgcccgccccggctctgactgaccgcgttactcccacaggtgagcgggcgggacggcccttctcctccgggctgtaattagcgcttggtttaatgacggcttgtttcttttctgtggctgcgtgaaagccttgaggggctccgggagggccctttgtgcggggggagcggctcggggggtgcgtgcgtgtgtgtgtgcgtggggagcgccgcgtgcggctccgcgctgcccggcggctgtgagcgctgcgggcgcggcgcggggctttgtgcgctccgcagtgtgcgcgaggggagcgcggccgggggcggtgccccgcggtgcggggggggctgcgaggggaacaaaggctgcgtgcggggtgtgtgcgtgggggggtgagcagggggtgtgggcgcgtcggtcgggctgcaaccccccctgcacccccctccccgagttgctgagcacggcccggcttcgggtgcggggctccgtacggggcgtggcgcggggctcgccgtgccgggcggggggtggcggcaggtgggggtgccgggcggggcggggccgcctcgggccggggagggctcgggggaggggcgcggcggcccccggagcgccggcggctgtcgaggcgcggcgagccgcagccattgccttttatggtaatcgtgcgagagggcgcagggacttcctttgtcccaaatctgtgcggagccgaaatctgggaggcgccgccgcaccccctctagcgggcgcggggcgaagcggtgcggcgccggcaggaaggaaatgggcggggagggccttcgtgcgtcgccgcgccgccgtccccttctccctctccagcctcggggctgtccgcggggggacggctgccttcgggggggacggggcagggcggggttcggcttctggcgtgtgaccggcggctctagagcctctgctaaccatgttcatgccttcttctttttcctacaggcacctgtgattgcctcgggagttgaaatacacccagattgccaccatgaccgagtacaagcccacggtgcgcctcgccacccgcgacgacgtccccagggccgtacgcaccctcgccgccgcgttcgccgactaccccgccacgcgccacaccgtcgatccggaccgccacatcgagcgggtcaccgagctgcaagaactcttcctcacgcgcgtcgggctcgacatcggcaaggtgtgggtcgcggacgacggcgccgcggtggcggtctggaccacgccggagagcgtcgaagcgggggcggtgttcgccgagatcggcccgcgcatggccgagttgagcggttcccggctggccgcgcagcaacagatggaaggcctcctggcgccgcaccggcccaaggagcccgcgtggttcctggccaccgtcggcgtctcgcccgaccaccagggcaagggtctgggcagcgccgtcgtgctccccggagtggaggcggccgagcgcgccggggtgcccgccttcctggagacctccgcgccccgcaacctccccttctacgagcggctcggcttcaccgtcaccgccgacgtcgaggtgcccgaaggaccgcgcacctggtgcatgacccgcaagcccggtgccggcggcgggtccggaggagagggcagaggaagtctcctaacatgcggtgacgtggaggagaatcctggcccaatggtagagatgctgccaactgtcgctgtgctggtcttggcagtgtccgtggttgccaaggataacaccacgctgcaggaattcgccaccatggtgagcaagggcgaggaggataacatggccatcatcaaggagttcatgcgcttcaaggtgcacatggagggctccgtgaacggccacgagttcgagatcgagggcgagggcgagggccgcccctacgagggcacccagaccgccaagctgaaggtgaccaagggtggccccctgcccttcgcctgggacatcctgtcccctcagttcatgtacggctccaaggcctacgtgaagcaccccgccgacatccccgactacttgaagctgtccttccccgagggcttcaagtgggagcgcgtgatgaacttcgaggacggcggcgtggtgaccgtgacccaggactcctccctgcaggacggcgagttcatctacaaggtgaagctgcgcggcaccaacttcccctccgacggccccgtaatgcagaagaagaccatgggctgggaggcctcctccgagcggatgtaccccgaggacggcgccctgaagggcgagatcaagcagaggctgaagctgaaggacggcggccactacgacgctgaggtcaagaccacctacaaggccaagaagcccgtgcagctgcccggcgcctacaacgtcaacatcaagttggacatcacctcccacaacgaggactacaccatcgtggaacagtacgaacgcgccgagggccgccactccaccggcggcatggacgagctgtacaagcaggttcaactggtggaaagcggcggtgctctggtacaaccgggcggtagtctgcgcctgagctgtgccgcaagcggtttcccagtcaaccgctactctatgcgttggtatcgccaggcgcctggtaaagaacgtgaatgggttgccggcatgagcagtgcgggcgatcgttctagttacgaggactctgttaaaggtcgttttacaattagccgtgatgatgcgcgcaataccgtgtatctgcaaatgaacagtctgaagccggaggacaccgcagtatattattgcaatgtcaacgtggggtttgaatattggggccaggggactcaggtgacggtgagctctcaactcgagaatggcggcataagcctgctggttcagaacacatcctggatgctgctgctgctgctttccctctccctcctccaagccctggacttcatttctctgtaattaccaatagtcggcggttatcagcggaccctacgaagttgcggccgcgattaaaaaacctcccacacctccccctgaacctgaaacataaaatgaatgcaattgttgttgttaacttgtttattgcagcttataatggttacaaataaagcaatagcatcacaaatttcacaaataaagcatttttttcactgcattctagttgtggtttgtccaaactcatcaatgtatcttaaggaattcgataaaagttttgttactttatagaagaaattttgagtttttgtttttttttaataaataaataaacataaataaattgtttgttgaatttattattagtatgtaagtgtaaatataataaaacttaatatctattcaaattaataaataaacctcgatatacagaccgataaaacacatgcgtcaattttacgcatgattatctttaacgtacgtcacaatatgattatctttctagggttaatctagctgcggcgcgccggtacccaattcgccctatagtgagtcgtattacgcgcgctcactggccgtcgttttacaacgtcgtgactgggaaaaccctggcgttacccaacttaatcgccttgcagcacatccccctttcgccagctggcgtaatagcgaagaggcccgcaccgatcgcccttcccaacagttgcgcagcctgaatggcgaatgggacgcgccctgtagcggcgcattaagcgcggcgggtgtggtggttacgcgcagcgtgaccgctacacttgccagcgccctagcgcccgctcctttcgctttcttcccttcctttctcgccacgttcgccggctttccccgtcaagctctaaatcgggggctccctttagggttccgatttagtgctttacggcacctcgaccccaaaaaacttgattagggtgatggttcacgtagtgggccatcgccctgatagacggtttttcgccctttgacgttggagtccacgttctttaatagtggactcttgttccaaactggaacaacactcaaccctatctcggtctattcttttgatttataagggattttgccgatttcggcctattggttaaaaaatgagctgatttaacaaaaatttaacgcgaattttaacaaaatattaacgcttacaatttaggtggcacttttcggggaaatgtgcgcggaacccctatttgtttatttttctaaatacattcaaatatgtatccgctcatgagacaataaccctgataaatgcttcaataatattgaaaaaggaagagtatgagtattcaacatttccgtgtcgcccttattcccttttttgcggcattttgccttcctgtttttgctcacccagaaacgctggtgaaagtaaaagatgctgaagatcagttgggtgcacgagtgggttacatcgaactggatctcaacagcggtaagatccttgagagttttcgccccgaagaacgttttccaatgatgagcacttttaaagttctgctatgtggcgcggtattatcccgtattgacgccgggcaagagcaactcggtcgccgcatacactattctcagaatgacttggttgagtactcaccagtcacagaaaagcatcttacggatggcatgacagtaagagaattatgcagtgctgccataaccatgagtgataacactgcggccaacttacttctgacaacgatcggaggaccgaaggagctaaccgcttttttgcacaacatgggggatcatgtaactcgccttgatcgttgggaaccggagctgaatgaagccataccaaacgacgagcgtgacaccacgatgcctgtagcaatggcaacaacgttgcgcaaactattaactggcgaactacttactctagcttcccggcaacaattaatagactggatggaggcggataaagttgcaggaccacttctgcgctcggcccttccggctggctggtttattgctgataaatctggagccggtgagcgtgggtctcgcggtatcattgcagcactggggccagatggtaagccctcccgtatcgtagttatctacacgacggggagtcaggcaactatggatgaacgaaatagacagatcgctgagataggtgcctcactgattaagcattggtaactgtcagaccaagtttactcatatatactttagattgatttaaaacttcatttttaatttaaaaggatctaggtgaagatcctttttgataatctcatgaccaaaatcccttaacgtgagttttcgttccactgagcgtcagaccccgtagaaa

SEQ ID NO: 68 - DNA, 7539 bp, synthetic construct
  source 1..7539: mol_type = other DNA
gttgtttaccctcacaacgttccagtaaccgggcatgttcatcatcagtaacccgtatcgtgagcatcctctctcgtttcatcggtatcattacccccatgaacagaaatcccccttacacggaggcatcagtgaccaaacaggaaaaaaccgcccttaacatggcccgctttatcagaagccagacattaacgcttctggagaaactcaacgagctggacgcggatgaacaggcagacatctgtgaatcgcttcacgaccacgctgatgagctttaccgcagctgcctcgcgcgtttcggtgatgacggtgaaaacctctgacacatgcagctcccggagacggtcacagcttgtctgtaagcggatgccgggagcagacaagcccgtcagggcgcgtcagcgggtgttggcgggtgtcggggcgcagccatgacccagtcacgtagcgatagcggagtgtatactggcttaactatgcggcatcagagcagattgtactgagagtgcaccatatgcggtgtgaaataccgcacagatgcgtaaggagaaaataccgcatcaggcgctcttccgcttcctcgctcactgactcgctgcgctcggtcgttcggctgcggcgagcggtatcagctcactcaaaggcggtaatacggttatccacagaatcaggggataacgcaggaaagaacatgtgagcaaaaggccagcaaaaggccaggaaccgtaaaaaggccgcgttgctggcgtttttccataggctccgcccccctgacgagcatcacaaaaatcgacgctcaagtcagaggtggcgaaacccgacaggactataaagataccaggcgtttccccctggaagctccctcgtgcgctctcctgttccgaccctgccgcttaccggatacctgtccgcctttctcccttcgggaagcgtggcgctttctcatagctcacgctgtaggtatctcagttcggtgtaggtcgttcgctccaagctgggctgtgtgcacgaaccccccgttcagcccgaccgctgcgccttatccggtaactatcgtcttgagtccaacccggtaagacacgacttatcgccactggcagcagccactggtaacaggattagcagagcgaggtatgtaggcggtgctacagagttcttgaagtggtggcctaactacggctacactagaaggacagtatttggtatctgcgctctgctgaagccagttaccttcggaaaaagagttggtagctcttgatccggcaaacaaaccaccgctggtagcggtggtttttttgtttgcaagcagcagattacgcgcagaaaaaaaggatctcaagaagatcctttgatcttttctacggggtctgacgctcagtggaacgaaaactcacgttaagggattttggtcatgagattatcaaaaaggatcttcacctagatccttttaaattaaaaatgaagttttaaatcaagttgcgactgtagagcgttgaccctgacacaatacttacgattaccctgttatccctacgctaccttcggtgaaagtgagtcggcacaatctcgtaatgtgaacactgcttcgccacttattgatagtcgcaacgggagcgatcgctaaaagcagcgattcgtggctcagtcccagagtcgtatctagctagtcaggtagtaaaaggtctcaactaggcagtggcagagcaggattcaaattcagggctgttgtgatgcctccgcagactctgagcgccacctggtggtaatttgtctgtgcctcttctgacgtggaagaacagcaactaacacactaacacggcatttactatgggccagccattgttctaaagccctcgttcacagagaaagttcggttacactgcggatttcgacattgattattgactagttattaatagtaatcaattacggggtcattagttcatagcccatatatggagttccgcgttacataacttacggtaaatggcccgcctggctgaccgcccaacgacccccgcccattgacgtcaataatgacgtatgttcccatagtaacgccaatagggactttccattgacgtcaatgggtggactatttacggtaaactgcccacttggcagtacatcaagtgtatcatatgccaagtacgccccctattgacgtcaatgacggtaaatggcccgcctggcattatgcccagtacatgaccttatgggactttcctacttggcagtacatctacgtattagtcatcgctattaccatgggtcgaggtgagccccacgttctgcttcactctccccatctcccccccctccccacccccaattttgtatttatttattttttaattattttgtgcagcgatgggggcggggggggggggggcgcgcgccaggcggggcggggcggggcgaggggcggggcggggcgaggcggagaggtgcggcggcagccaatcagagcggcgcgctccgaaagtttccttttatggcgaggcggcggcggcggcggccctataaaaagcgaagcgcgcggcgggcgggagtcgctgcgttgccttcgccccgtgccccgctccgcgccgcctcgcgccgcccgccccggctctgactgaccgcgttactcccacaggtgagcgggcgggacggcccttctcctccgggctgtaattagcgcttggtttaatgacggctcgtttcttttctgtggctgcgtgaaagccttaaagggctccgggagggccctttgtgcgggggggagcggctcggggggtgcgtgcgtgtgtgtgtgcgtggggagcgccgcgtgcggcccgcgctgcccggcggctgtgagcgctgcgggcgcggcgcggggctttgtgcgctccgcgtgtgcgcgaggggagcgcggccgggggcggtgccccgcggtgcgggggggctgcgaggggaacaaaggctgcgtgcggggtgtgtgcgtgggggggtgagcagggggtgtgggcgcggcggtcgggctgtaacccccccctgcacccccctccccgagttgctgagcacggcccggcttcgggtgcggggctccgtgcggggcgtggcgcggggctcgccgtgccgggcggggggtggcggcaggtgggggtgccgggcggggcggggccgcctcgggccggggagggctcgggggaggggcgcggcggccccggagcgccggcggctgtcgaggcgcggcgagccgcagccattgccttttatggtaatcgtgcgagagggcgcagggacttcctttgtcccaaatctggcggagccgaaatctgggaggcgccgccgcaccccctctagcgggcgcgggcgaagcggtgcggcgccggcaggaaggaaatgggcggggagggccttcgtgcgtcgccgcgccgccgtccccttctccatctccagcctcggggctgccgcagggggacggctgccttcgggggggacggggcagggcggggttcggcttctggcgtgtgaccggcggctctagagcctctgctaaccatgttcatgccttcttctttttcctacagctcctgggcaacgtgctggttattgtgctgtctcatcattttggcaaaggcacctgtgattgcctcgggagttgaaatacacccagattgccaccatggcctcaccgttgacccgctttctgtcgctgaacctgctgctgctgggtgagtcgattatcctggggagtggagaagctactagtatggtgagcaagggcgaggagctgttcaccggggtggtgcccatcctggtcgagctggacggcgacgtaaacggccacaagttcagcgtgtccggcgagggcgagggcgatgccacctacggcaagctgaccctgaagttcatctgcaccaccggcaagctgcccgtgccctggcccaccctcgtgaccaccctgacctacggcgtgcagtgcttcagccgctaccccgaccacatgaagcagcacgacttcttcaagtccgccatgcccgaaggctacgtccaggagcgcaccatcttcttcaaggacgacggcaactacaagacccgcgccgaggtgaagttcgagggcgacaccctggtgaaccgcatcgagctgaagggcatcgacttcaaggaggacggcaacatcctggggcacaagctggagtacaactacaacagccacaacgtctatatcatggccgacaagcagaagaacggcatcaaggtgaacttcaagatccgccacaacatcgaggacggcagcgtgcagctcgccgaccactaccagcagaacacccccatcggcgacggccccgtgctgctgcccgacaaccactacctgagcacccagtccgccctgagcaaagaccccaacgagaagcgcgatcacatggtcctgctggagttcgtgaccgccgccgggatcactctcggcatggatgaactatacaagactagtaagccacaggcacccgaactccgaatctttccaaagaaaatggacgccgaacttggtcagaaggtggacctggtatgtgaagtgttggggtccgtttcgcaaggatgctcttggctcttccagaactccagctccaaactcccccagcccaccttcgttgtctatatggcttcatcccacaacaagataacgtgggacgagaagctgaattcgtcgaaactgttttctgccatgagggacacgaataataagtacgttctcaccctgaacaagttcagcaaggaaaacgaaggctactatttctgctcagtcatcagcaactcggtgatgtacttcagttctgtcgtgccagtccttcagaaagtgaactctactactaccaagccagtgctgcgaactccctcacctgtgcaccctaccgggacatctcagccccagagaccagaagattgtcggccccgtggctcagtgaaggggaccggattggacttcgcctgtgatatttacatctgggcacccttggccggaatctgcgtggcccttctgctgtccttgatcatcactctcatctgctaccacagccgcggatccacctaattaccaatagtcggcggttatcagcggaccctacgaagttggagtaacgaccttgaagacgagtacagagttccggtttgaatcaacctctggattacaaaatttgtgaaagattgactggtattcttaactatgttgctccttttacgctatgtggatacgctgctttaatgcctttgtatcatgctattgcttcccgtatggctttcattttctcctccttgtataaatcctggttgctgtctctttatgaggagttgtggcccgttgtcaggcaacgtggcgtggtgtgcactgtgtttgctgacgcaacccccactggttggggcattgccaccacctgtcagctcctttccgggactttcgctttccccctccctattgccacggcggaactcatcgccgcctgccttgcccgctgctggacaggggctcggctgttgggcactgacaattccgtggtgttgtcctcgagtctagagggcccgtttaaacccgctgatcagcctcgactgtgccttctagttgccagccatctgttgtttgcccctcccccgtgccttccttgaccctggaaggtgccactcccactgtcctttcctaataaaatgaggaaattgcatcgcattgtctgagtaggtgtcattctattctggggggtggggtggggcaggacagcaagggggaggattgggaagacaatagcaggcatgctggggatgcggtgggctctatggctatgagttcgttccctccttgcctcctggtggtagatagttctccaaccgaagtgtttacggaagatagagcccgctgttagccctgagtctgcgttgtaagagcaataggtccactacgcgatcgcgcttttaccacgaacgataataggttggcgggtcactccaaaaagggtcgtgcggcgatactacaatctcctgttactcgtagggataacagggtaatcctgaaaagtggataaccagcaccgttgtgagtgtctcctagacgtcaggtggcacttttcggggaaatgtgcgcggaacccctatttgtttatttttctaaatacattcaaatatgtatccgctcatgagacaataaccctgataaatgcttcaataatattgaaaaaggaagagtatgagtattcaacatttccgtgtcgcccttattcccttttttgcggcattttgccttcctgtttttgctcacccagaaacgctggtgaaagtaaaagatgctgaagatcagttgggtgcacgagtgggttacatcgaactggatctcaacagcggtaagatccttgagagttttcgccccgaagaacgttttccaatgatgagcacttttaaagttctgctatgtggcgcggtattatcccgtgttgacgccgggcaagagcaactcggtcgccgcatacactattctcagaatgacttggttgagtactcaccagtcacagaaaagcatcttacggatggcatgacagtaagagaattatgcagtgctgccataaccatgagtgataacactgcggccaacttacttctgacaacgatcggaggaccgaaggagctaaccgcttttttgcacaacatgggggatcatgtaactcgccttgatcgttgggaaccggagctgaatgaagccataccaaacgacgagcgtgacaccacgatgcctgcagcaatggcaacaacgttgcgcaaactattaactggcgaactacttactctagcttcccggcaacaattaatagactggatggaggcggataaagttgcaggaccacttctgcgctcggcccttccggctggctggtttattgctgataaatctggagccggtgagcgtgggtctcgcggtatcattgcagcactggggccagatggtaagccctcccgtatcgtagttatctacacgacggggagtcaggcaactatggatgaacgaaatagacagatcgctgagataggtgcctcactgattaagcattggtaactgtcagaccaagtttactcatatatactttagacgcagtccctgtcctgagtagtaaacttccgaatagagtgattctgacaccgtgagtaagcacaggtcgggtcttcaatcatcgtctacggattgggacaccgaggtttctgaactcaacatgatcgtgctcctgtcgttgaggacccggctaggctggcggggttgccttactggttagcagaatgaatcaccgatacgcgagcgaacgtgaagcgactgctgctgcaaaacgtctgcgacctgagcaacaacatgaatggtcttcggtttccgtgtttcgtaaagtctggaaacgcggaagtcagcgccctgcaccattatgttccggatctgcatcgcaggatgctgctggctaccctgtggaacacctacatctgtattaacgaagcgctggcattgaccctgagtgatttttctctggtcccgccgcatccataccgcca

SEQ ID NO: 69 - DNA, 6382 bp, synthetic construct
  source 1..6382: mol_type = other DNA
gacattgattattgactagttattaatagtaatcaattacggggtcattagttcatagcccatatatggagttccgcgttacataacttacggtaaatggcccgcctggctgaccgcccaacgacccccgcccattgacgtcaataatgacgtatgttcccatagtaacgccaatagggactttccattgacgtcaatgggtggagtatttacggtaaactgcccacttggcagtacatcaagtgtatcatatgccaagtacgccccctattgacgtcaatgacggtaaatggcccgcctggcattatgcccagtacatgaccttatgggactttcctacttggcagtacatctacgtattagtcatcgctattaccatggtcgaggtgagccccacgttctgcttcactctccccatctcccccccctccccacccccaattttgtatttatttattttttaattattttgtgcagcgatgggggcgggggggggcgaggcggagaggtgcggcggcagccaatcagagcggcgcgctccgaaagtttccttttatggcgaggcggcggcggcggcggccctataaaaagcgaagcgcgcggcgggcgggagtcgctgcgcgctgccttcgccccgtgccccgctccgccgccgcctcgcgccgcccgccccggctctgactgaccgcgttactcccacaggtgagcgggcgggacggcccttctcctccgggctgtaattagcgcttggtttaatgacggcttgtttcttttctgtggctgcgtgaaagccttgaggggctccgggagggccctttgtgcggggggagcggctcggggggtgcgtgcgtgtgtgtgtgcgtggggagcgccgcgtgcggctccgcgctgcccggcggctgtgagcgctgcgggcgcggcgcggggctttgtgcgctccgcagtgtgcgcgaggggagcgcggccgggggcggtgccccgcggtgcggggggggctgcgaggggaacaaaggctgcgtgcggggtgtgtgcgtgggggggtgagcagggggtgtgggcgcgtcggtcgggctgcaaccccccctgcacccccctccccgagttgctgagcacggcccggcttcgggtgcggggctccgtacggggcgtggcgcggggctcgccgtgccgggcggggggtggcggcaggtgggggtgccgggcggggcggggccgcctcgggccggggagggctcgggggaggggcgcggcggcccccggagcgccggcggctgtcgaggcgcggcgagccgcagccattgccttttatggtaatcgtgcgagagggcgcagggacttcctttgtcccaaatctgtgcggagccgaaatctgggaggcgccgccgcaccccctctagcgggcgcggggcgaagcggtgcggcgccggcaggaaggaaatgggcggggagggccttcgtgcgtcgccgcgccgccgtccccttctccctctccagcctcggggctgtccgcggggggacggctgccttcgggggggacggggcagggcggggttcggcttctggcgtgtgaccggcggctctagagcctctgctaaccatgttcatgccttcttctttttcctacagctcctgggcaacgtgctggttattgtgctgtctcatcattttggcaaagaagtaccgagctcggatccactagtaacggccgccagtgtgctggaattcgccaccatgaccgagtacaagcccacggtgcgcctcgccacccgcgacgacgtccccagggccgtacgcaccctcgccgccgcgttcgccgactaccccgccacgcgccacaccgtcgatccggaccgccacatcgagcgggtcaccgagctgcaagaactcttcctcacgcgcgtcgggctcgacatcggcaaggtgtgggtcgcggacgacggcgccgcggtggcggtctggaccacgccggagagcgtcgaagcgggggcggtgttcgccgagatcggcccgcgcatggccgagttgagcggttcccggctggccgcgcagcaacagatggaaggcctcctggcgccgcaccggcccaaggagcccgcgtggttcctggccaccgtcggcgtctcgcccgaccaccagggcaagggtctgggcagcgccgtcgtgctccccggagtggaggcggccgagcgcgccggggtgcccgccttcctggagacctccgcgccccgcaacctccccttctacgagcggctcggcttcaccgtcaccgccgacgtcgaggtgcccgaaggaccgcgcacctggtgcatgacccgcaagcccggtgccggcggcgggtccggaggagagggcagaggaagtctcctaacatgcggtgacgtggaggagaatcctggcccaatggtagagatgctgccaactgtcgctgtgctggtcttggcagtgtccgtggttgccaaggataacaccacgctgcaggaattcgccaccatggtgagcaagggcgaggagctgttcaccggggtggtgcccatcctggtcgagctggacggcgacgtaaacggccacaagttcagcgtgtccggcgagggcgagggcgatgccacctacggcaagctgaccctgaagttcatctgcaccaccggcaagctgcccgtgccctggcccaccctcgtgaccaccctgacctacggcgtgcagtgcttcagccgctaccccgaccacatgaagcagcacgacttcttcaagtccgccatgcccgaaggctacgtccaggagcgcaccatcttcttcaaggacgacggcaactacaagacccgcgccgaggtgaagttcgagggcgacaccctggtgaaccgcatcgagctgaagggcatcgacttcaaggaggacggcaacatcctggggcacaagctggagtacaactacaacagccacaacgtctatatcatggccgacaagcagaagaacggcatcaaggtgaacttcaagatccgccacaacatcgaggacggcagcgtgcagctcgccgaccactaccagcagaacacccccatcggcgacggccccgtgctgctgcccgacaaccactacctgagcacccagtccgccctgagcaaagaccccaacgagaagcgcgatcacatggtcctgctggagttcgtgaccgccgccgggatcactctcggcatggatgaactataccaactcgagaatggcggcataagcctgctggttcagaacacatcctggatgctgctgctgctgctttccctctccctcctccaagccctggacttcatttctctgtaagcggcaattcactcctcaggtgcaggctgcctatcagaaggtggtggctggtgtggccaatgccctggctcacaaataccactgagatctttttccctctgccaaaaattatggggacatcatgaagccccttgagcatctgacttctggctaataaaggaaatttattttcattgcaatagtgtgttggaattttttgtgtctctcactcggaaggacatatgggagggcaaatcatttaaaacatcagaatgagtatttggtttagagtttggcaacatatgcccatatgctggctgccatgaacaaaggttggctataaagaggtcatcagtatatgaaacagccccctgctgtccattccttattccatagaaaagccttgacttgaggttagattttttttatattttgttttgtgttatttttttctttaacatccctaaaattttccttacatgttttactagccagatttttcctcctctcctgactactcccagtcatagctgtccctcttctcttatggagatccctcgacctgcagcccaagcttggcgtaatcatggtcatagctgtttcctgtgtgaaattgttatccgctcacaattccacacaacatacgagccggaagcataaagtgtaaagcctggggtgcctaatgagtgagctaactcacattaattgcgttgcgctcactgcccgctttccagtcgggaaacctgtcgtgccagcggatccgcatctcaattagtcagcaaccatagtcccgcccctaactccgcccatcccgcccctaactccgcccagttccgcccattctccgccccatggctgactaattttttttatttatgcagaggccgaggccgcctcggcctctgagctattccagaagtagtgaggaggcttttttggaggcctaggcttttgcaaaaagctaacttgtttattgcagcttataatggttacaaataaagcaatagcatcacaaatttcacaaataaagcatttttttcactgcattctagttgtggtttgtccaaactcatcaatgtatcttatcatgtctggatccgctgcattaatgaatcggccaacgcgcggggagaggcggtttgcgtattgggcgctcttccgcttcctcgctcactgactcgctgcgctcggtcgttcggctgcggcgagcggtatcagctcactcaaaggcggtaatacggttatccacagaatcaggggataacgcaggaaagaacatgtgagcaaaaggccagcaaaaggccaggaaccgtaaaaaggccgcgttgctggcgtttttccataggctccgcccccctgacgagcatcacaaaaatcgacgctcaagtcagaggtggcgaaacccgacaggactataaagataccaggcgtttccccctggaagctccctcgtgcgctctcctgttccgaccctgccgcttaccggatacctgtccgcctttctcccttcgggaagcgtggcgctttctcatagctcacgctgtaggtatctcagttcggtgtaggtcgttcgctccaagctgggctgtgtgcacgaaccccccgttcagcccgaccgctgcgccttatccggtaactatcgtcttgagtccaacccggtaagacacgacttatcgccactggcagcagccactggtaacaggattagcagagcgaggtatgtaggcggtgctacagagttcttgaagtggtggcctaactacggctacactagaagaacagtatttggtatctgcgctctgctgaagccagttaccttcggaaaaagagttggtagctcttgatccggcaaacaaaccaccgctggtagcggtggtttttttgtttgcaagcagcagattacgcgcagaaaaaaaggatctcaagaagatcctttgatcttttctacggggtctgacgctcagtggaacgaaaactcacgttaagggattttggtcatgagattatcaaaaaggatcttcacctagatccttttaaattaaaaatgaagttttaaatcaatctaaagtatatatgagtaaacttggtctgacagttaccaatgcttaatcagtgaggcacctatctcagcgatctgtctatttcgttcatccatagttgcctgactccccgtcgtgtagataactacgatacgggagggcttaccatctggccccagtgctgcaatgataccgcgagacccacgctcaccggctccagatttatcagcaataaaccagccagccggaagggccgagcgcagaagtggtcctgcaactttatccgcctccatccagtctattaattgttgccgggaagctagagtaagtagttcgccagttaatagtttgcgcaacgttgttgccattgctacaggcatcgtggtgtcacgctcgtcgtttggtatggcttcattcagctccggttcccaacgatcaaggcgagttacatgatcccccatgttgtgcaaaaaagcggttagctccttcggtcctccgatcgttgtcagaagtaagttggccgcagtgttatcactcatggttatggcagcactgcataattctcttactgtcatgccatccgtaagatgcttttctgtgactggtgagtactcaaccaagtcattctgagaatagtgtatgcggcgaccgagttgctcttgcccggcgtcaatacgggataataccgcgccacatagcagaactttaaaagtgctcatcattggaaaacgttcttcggggcgaaaactctcaaggatcttaccgctgttgagatccagttcgatgtaacccactcgtgcacccaactgatcttcagcatcttttactttcaccagcgtttctgggtgagcaaaaacaggaaggcaaaatgccgcaaaaaagggaataagggcgacacggaaatgttgaatactcatactcttcctttttcaatattattgaagcatttatcagggttattgtctcatgagcggatacatatttgaatgtatttagaaaaataaacaaataggggttccgcgcacatttccccgaaaagtgccacctgggtc

SEQ ID NO: 70 - DNA, 8309 bp, synthetic construct
  source 1..8309: mol_type = other DNA
gcagctagattaaccctagaaagatagtctgcgtaaaattgacgcatgcattcttgaaatattgctctctctttctaaatagcgcgaatccgtcgctgtgcatttaggacatctcagtcgccgcttggagctcccgtgaggcgtgcttgtcaatgcggtaagtgtcactgattttgaactataacaaccgcgtgagtcaaaatgacgcatgattatcttttacgtgacttttaagatttaactcatacgataattatattgttatttcgtgttctacttacgtgataacttattatatatatattttcttgttatagatgggaattcagacatgataagatacattgatgagtttggacaaaccacaactagaatgcagtgaaaaaaatgctttatttgtgaaatttgtgatgctattgctttatttgtaaccattataagctgcaataaacaagtttcgaggtcgagtgtcagtcctgctcctcggccacgaagtgcttagctcaggcaccgggcttgcgggtcatgcaccaggtgcgcggtccttcgggcacctcgacgtcggcggtgacggtgaagccgagccgctcgtagaaggggaggttgcggggcgcggaggtctccaggaaggcgggcaccccggcgcgctcggccgcctccactccggggagcacgacggcgctgcccagacccttgccctggtggtcgggcgagacgccgacggtggccaggaaccacgcgggctccttgggccggtgcggcgccaggaggccttccatctgttgctgcgcggccagccgggaaccgctcaactcggccatgcgcgggccgatctcggcgaacaccgcccccgcttcgacgctctccggcgtggtccagaccgccaccgcggcgccgtcgtccgcgacccacaccttgccgatgtcgagcccgacgcgcgtgaggaagagttcttgcagctcggtgacccgctcgatgtggcggtccgggtcgacggtgtggcgcgtggcggggtagtcggcgaacgcggcggcgagggtgcgtacggcccgggggacgtcgtcgcgggtggcgaggcgcaccgtgggcttgtactcggccatggtagggccgggattctcctccacgtcaccgcatgttagaagacttcctctgccctccccggggagcatgtcaaggtcaaaatcgtcaagagcgtcagcaggcagcatatcaaggtcaaagtcgtcaagggcatcggctgggagcatgtctaagtcaaaatcgtcaagggcgtcggccggcccgccgctttcgcactttagctgtttctccaggccacatatgattagttccaggccgaaaaggaaggcaggttcggctccctgccggtcgaacagctcaattgcttgtctcagaagtgggggcatagaatcggtggtaggtgtctctctttcctcttttgctacttgatgctcctgttcctccaatacgcagcccagtgtaaagtggcccacggcggacagagcgtacagtgcgttctccagggagaagccttgctgacacaggaacgcgagctgattttccagggtttcgtactgtttctctgttgggcgggtgccgagatgcactttagccccgtcgcgatgtgagaggagagcacagcggaatgacttggcgttgttccgcagaaagtcttgccatgactcgccttccagggggcagaagtgggtatgatgcctgtccagcatctcgattggcagggcatcgagcagggcccgcttgttcttcacgtgccagtacagggtaggctgctcaactcccagcttttgagcgagtttccttgtcgtcaggccttcgataccgactccattgagtaattccagagcgccgtttatgactttgctcttgtccagtctagacatggggtttagttcctcaccttgtcgtattatactatgccgatatactatgccgatgattaattgtcaacacggtccggtctaacaaaaaagccaaaaacggccagaatttagcggacaatttactagtctaacactgaaaattacatattgacccaaatgattacatttcaaaaggtgcctaaaaaacttcacaaaacacactcgccaaccccgagcgcatagttcaaaaccggagcttcagctacttaagaagataggtacataaaaccgaccaaagaaactgacgcctcacttatccctcccctcaccagaggtccggcgcctgtcgattcaggagagcctaccctaggcccgaaccctgcgtcctgcgacggagaaaagcctaccgcacacctaccggcaggtggccccaccctgcattataagccaacagaacgggtgacgtcacgacacgacgagggcgcgcgctcccaaaggtacgggtgcactgcccaacggcaccgccataactgccgcccccgcaacagacgacaaaccgagttctccagtcagtgacaaacttcacgtcagggtccccagatggtgccccagcccatctcacccgaataagagctttcccgcattagcgaaggcctcaagaccttgggttcttgccgcccaccatgccccccaccttgtttcaacgacctcacagcccgcctcacaagcgtcttccattcaagactcgggaacagccgccattttgctgcgctccccccaacccccagttcagggcaaccttgctcgcggacccagactacagcccttggcggtctctccacacgcttccgtcccaccgagcggcccggcggccacgaaagccccggccagcccagcagcccgctactcaccaagtgacgatcacagcgatccacaaacaagaaccgcgacccaaatcccggctgcgacggaactagctgtgccacacccggcgcgtccttatataatcatcggcgttcaccgccccacggagatccctccgcagaatcgccgagaagggactacttttcctcgcctgttccgctctctggaaagaaaaccagtgccctagagtcacccaagtcccgtcctaaaatgtccttctgctgatactggggttctaaggccgagtcttatgagcagcgggccgctgtcctgagcgtccgggcggaaggatcaggacgctcgtgcgcccttcgtctgacgtggcagcgctcgccgtgaggagggggcgcccgcggggggcgccaaaacccggcgcggaggccagatctcccgatctcgagtttactccctatcagtgatagagaacgtatgtcgagtttactccctatcagtgatagagaacgatgtcgagtttactccctatcagtgatagagaacgtatgtcgagtttactccctatcagtgatagagaacgtatgtcgagtttactccctatcagtgatagagaacgtatgtcgagtttatccctatcagtgatagagaacgtatgtcgagtttactccctatcagtgatagagaacgtatgtcgaggtaggcgtgtacggtgggaggcctatataagcagagctcgtttagtgaaccgtcagatcgcctggagaattcgagctcggtacccggggatctgccaccatggcctcaccgttgacccgctttctgtcgctgaacctgctgctgctgggtgagtcgattatcctggggagtggagaagctactagtatggtgagcaagggcgaggagctgttcaccggggtggtgcccatcctggtcgagctggacggcgacgtaaacggccacaagttcagcgtgtccggcgagggcgagggcgatgccacctacggcaagctgaccctgaagttcatctgcaccaccggcaagctgcccgtgccctggcccaccctcgtgaccaccctgacctacggcgtgcagtgcttcagccgctaccccgaccacatgaagcagcacgacttcttcaagtccgccatgcccgaaggctacgtccaggagcgcaccatcttcttcaaggacgacggcaactacaagacccgcgccgaggtgaagttcgagggcgacaccctggtgaaccgcatcgagctgaagggcatcgacttcaaggaggacggcaacatcctggggcacaagctggagtacaactacaacagccacaacgtctatatcatggccgacaagcagaagaacggcatcaaggtgaacttcaagatccgccacaacatcgaggacggcagcgtgcagctcgccgaccactaccagcagaacacccccatcggcgacggccccgtgctgctgcccgacaaccactacctgagcacccagtccgccctgagcaaagaccccaacgagaagcgcgatcacatggtcctgctggagttcgtgaccgccgccgggatcactctcggcatggatgaactatacaagactagtaagccacaggcacccgaactccgaatctttccaaagaaaatggacgccgaacttggtcagaaggtggacctggtatgtgaagtgttggggtccgtttcgcaaggatgctcttggctcttccagaactccagctccaaactcccccagcccaccttcgttgtctatatggcttcatcccacaacaagataacgtgggacgagaagctgaattcgtcgaaactgttttctgccatgagggacacgaataataagtacgttctcaccctgaacaagttcagcaaggaaaacgaaggctactatttctgctcagtcatcagcaactcggtgatgtacttcagttctgtcgtgccagtccttcagaaagtgaactctactactaccaagccagtgctgcgaactccctcacctgtgcaccctaccgggacatctcagccccagagaccagaagattgtcggccccgtggctcagtgaaggggaccggattggacttcgcctgtgatatttacatctgggcacccttggccggaatctgcgtggcccttctgctgtccttgatcatcactctcatctgctaccacagccgcggatccacctaagcggccgcgattaaaaaacctcccacacctccccctgaacctgaaacataaaatgaatgcaattgttgttgttaacttgtttattgcagcttataatggttacaaataaagcaatagcatcacaaatttcacaaataaagcatttttttcactgcattctagttgtggtttgtccaaactcatcaatgtatcttaaggaattcgataaaagttttgttactttatagaagaaattttgagtttttgtttttttttaataaataaataaacataaataaattgtttgttgaatttattattagtatgtaagtgtaaatataataaaacttaatatctattcaaattaataaataaacctcgatatacagaccgataaaacacatgcgtcaattttacgcatgattatctttaacgtacgtcacaatatgattatctttctagggttaatctagctgcggcgcgccggtacccaattcgccctatagtgagtcgtattacgcgcgctcactggccgtcgttttacaacgtcgtgactgggaaaaccctggcgttacccaacttaatcgccttgcagcacatccccctttcgccagctggcgtaatagcgaagaggcccgcaccgatcgcccttcccaacagttgcgcagcctgaatggcgaatgggacgcgccctgtagcggcgcattaagcgcggcgggtgtggtggttacgcgcagcgtgaccgctacacttgccagcgccctagcgcccgctcctttcgctttcttcccttcctttctcgccacgttcgccggctttccccgtcaagctctaaatcgggggctccctttagggttccgatttagtgctttacggcacctcgaccccaaaaaacttgattagggtgatggttcacgtagtgggccatcgccctgatagacggtttttcgccctttgacgttggagtccacgttctttaatagtggactcttgttccaaactggaacaacactcaaccctatctcggtctattcttttgatttataagggattttgccgatttcggcctattggttaaaaaatgagctgatttaacaaaaatttaacgcgaattttaacaaaatattaacgcttacaatttaggtggcacttttcggggaaatgtgcgcggaacccctatttgtttatttttctaaatacattcaaatatgtatccgctcatgagacaataaccctgataaatgcttcaataatattgaaaaaggaagagtatgagtattcaacatttccgtgtcgcccttattcccttttttgcggcattttgccttcctgtttttgctcacccagaaacgctggtgaaagtaaaagatgctgaagatcagttgggtgcacgagtgggttacatcgaactggatctcaacagcggtaagatccttgagagttttcgccccgaagaacgttttccaatgatgagcacttttaaagttctgctatgtggcgcggtattatcccgtattgacgccgggcaagagcaactcggtcgccgcatacactattctcagaatgacttggttgagtactcaccagtcacagaaaagcatcttacggatggcatgacagtaagagaattatgcagtgctgccataaccatgagtgataacactgcggccaacttacttctgacaacgatcggaggaccgaaggagctaaccgcttttttgcacaacatgggggatcatgtaactcgccttgatcgttgggaaccggagctgaatgaagccataccaaacgacgagcgtgacaccacgatgcctgtagcaatggcaacaacgttgcgcaaactattaactggcgaactacttactctagcttcccggcaacaattaatagactggatggaggcggataaagttgcaggaccacttctgcgctcggcccttccggctggctggtttattgctgataaatctggagccggtgagcgtgggtctcgcggtatcattgcagcactggggccagatggtaagccctcccgtatcgtagttatctacacgacggggagtcaggcaactatggatgaacgaaatagacagatcgctgagataggtgcctcactgattaagcattggtaactgtcagaccaagtttactcatatatactttagattgatttaaaacttcatttttaatttaaaaggatctaggtgaagatcctttttgataatctcatgaccaaaatcccttaacgtgagttttcgttccactgagcgtcagaccccgtagaaaagatcaaaggatcttcttgagatcctttttttctgcgcgtaatctgctgcttgcaaacaaaaaaaccaccgctaccagcggtggtttgtttgccggatcaagagctaccaactctttttccgaaggtaactggcttcagcagagcgcagataccaaatactgtccttctagtgtagccgtagttaggccaccacttcaagaactctgtagcaccgcctacatacctcgctctgctaatcctgttaccagtggctgctgccagtggcgataagtcgtgtcttaccgggttggactcaagacgatagttaccggataaggcgcagcggtcgggctgaacggggggttcgtgcacacagcccagcttggagcgaacgacctacaccgaactgagatacctacagcgtgagctatgagaaagcgccacgcttcccgaagggagaaaggcggacaggtatccggtaagcggcagggtcggaacaggagagcgcacgagggagcttccagggggaaacgcctggtatctttatagtcctgtcgggtttcgccacctctgacttgagcgtcgatttttgtgatgctcgtcaggggggcggagcctatggaaaaacgccagcaacgcggcctttttacggttcctggccttttgctggccttttgctcacatgttctttcctgcgttatcccctgattctgtggataaccgtattaccgcctttgagtgagctgataccgctcgccgcagccgaacgaccgagcgcagcgagtcagtgagcgaggaagcggaagagcgcccaatacgcaaaccgcctctccccgcgcgttggccgattcattaatgcagctggcacgacaggtttcccgactggaaagcgggcagtgagcgcaacgcaattaatgtgagttagctcactcattaggcaccccaggctttacactttatgcttccggctcgtatgttgtgtggaattgtgagcggataacaatttcacacaggaaacagctatgaccatgattacgccaagcgcgcaattaaccctcactaaagggaacaaaagctggagctccaccgcggggcgcgcc

SEQ ID NO: 71 - DNA, 6016 bp, synthetic construct
  source 1..6016: mol_type = other DNA
aatgggtggagtatttacggtaaactgcccacttggcagtacatcaagtgtatcatatgccaagtacgccccctattgacgtcaatgacggtaaatggcccgcctggcattatgcccagtacatgaccttatgggactttcctacttggcagtacatctacgtattagtcatcgctattaccatggtcgaggtgagccccacgttctgcttcactctccccatctcccccccctccccacccccaattttgtatttatttattttttaattattttgtgcagcgatgggggcgggggggggcgaggcggagaggtgcggcggcagccaatcagagcggcgcgctccgaaagtttccttttatggcgaggcggcggcggcggcggccctataaaaagcgaagcgcgcggcgggcgggagtcgctgcgcgctgccttcgccccgtgccccgctccgccgccgcctcgcgccgcccgccccggctctgactgaccgcgttactcccacaggtgagcgggcgggacggcccttctcctccgggctgtaattagcgcttggtttaatgacggcttgtttcttttctgtggctgcgtgaaagccttgaggggctccgggagggccctttgtgcggggggagcggctcggggggtgcgtgcgtgtgtgtgtgcgtggggagcgccgcgtgcggctccgcgctgcccggcggctgtgagcgctgcgggcgcggcgcggggctttgtgcgctccgcagtgtgcgcgaggggagcgcggccgggggcggtgccccgcggtgcggggggggctgcgaggggaacaaaggctgcgtgcggggtgtgtgcgtgggggggtgagcagggggtgtgggcgcgtcggtcgggctgcaaccccccctgcacccccctccccgagttgctgagcacggcccggcttcgggtgcggggctccgtacggggcgtggcgcggggctcgccgtgccgggcggggggtggcggcaggtgggggtgccgggcggggcggggccgcctcgggccggggagggctcgggggaggggcgcggcggcccccggagcgccggcggctgtcgaggcgcggcgagccgcagccattgccttttatggtaatcgtgcgagagggcgcagggacttcctttgtcccaaatctgtgcggagccgaaatctgggaggcgccgccgcaccccctctagcgggcgcggggcgaagcggtgcggcgccggcaggaaggaaatgggcggggagggccttcgtgcgtcgccgcgccgccgtccccttctccctctccagcctcggggctgtccgcggggggacggctgccttcgggggggacggggcagggcggggttcggcttctggcgtgtgaccggcggctctagagcctctgctaaccatgttcatgccttcttctttttcctacagctcctgggcaacgtgctggttattgtgctgtctcatcattttggcaaagaagtaccgagctcggatccactagtaacggccgccagtgtgctggaattcgccaccatgaccgagtacaagcccacggtgcgcctcgccacccgcgacgacgtccccagggccgtacgcaccctcgccgccgcgttcgccgactaccccgccacgcgccacaccgtcgatccggaccgccacatcgagcgggtcaccgagctgcaagaactcttcctcacgcgcgtcgggctcgacatcggcaaggtgtgggtcgcggacgacggcgccgcggtggcggtctggaccacgccggagagcgtcgaagcgggggcggtgttcgccgagatcggcccgcgcatggccgagttgagcggttcccggctggccgcgcagcaacagatggaaggcctcctggcgccgcaccggcccaaggagcccgcgtggttcctggccaccgtcggcgtctcgcccgaccaccagggcaagggtctgggcagcgccgtcgtgctccccggagtggaggcggccgagcgcgccggggtgcccgccttcctggagacctccgcgccccgcaacctccccttctacgagcggctcggcttcaccgtcaccgccgacgtcgaggtgcccgaaggaccgcgcacctggtgcatgacccgcaagcccggtgccggcggcgggtccggaggagagggcagaggaagtctcctaacatgcggtgacgtggaggagaatcctggcccaatggtagagatgctgccaactgtcgctgtgctggtcttggcagtgtccgtggttgccaaggataacaccacgctgcaggaattcgccaccatgcaggttcaactggtggaaagcggcggtgctctggtacaaccgggcggtagtctgcgcctgagctgtgccgcaagcggtttcccagtcaaccgctactctatgcgttggtatcgccaggcgcctggtaaagaacgtgaatgggttgccggcatgagcagtgcgggcgatcgttctagttacgaggactctgttaaaggtcgttttacaattagccgtgatgatgcgcgcaataccgtgtatctgcaaatgaacagtctgaagccggaggacaccgcagtatattattgcaatgtcaacgtggggtttgaatattggggccaggggactcaggtgacggtgagctctcaactcgagaatggcggcataagcctgctggttcagaacacatcctggatgctgctgctgctgctttccctctccctcctccaagccctggacttcatttctctgtaagcggcaattcactcctcaggtgcaggctgcctatcagaaggtggtggctggtgtggccaatgccctggctcacaaataccactgagatctttttccctctgccaaaaattatggggacatcatgaagccccttgagcatctgacttctggctaataaaggaaatttattttcattgcaatagtgtgttggaattttttgtgtctctcactcggaaggacatatgggagggcaaatcatttaaaacatcagaatgagtatttggtttagagtttggcaacatatgcccatatgctggctgccatgaacaaaggttggctataaagaggtcatcagtatatgaaacagccccctgctgtccattccttattccatagaaaagccttgacttgaggttagattttttttatattttgttttgtgttatttttttctttaacatccctaaaattttccttacatgttttactagccagatttttcctcctctcctgactactcccagtcatagctgtccctcttctcttatggagatccctcgacctgcagcccaagcttggcgtaatcatggtcatagctgtttcctgtgtgaaattgttatccgctcacaattccacacaacatacgagccggaagcataaagtgtaaagcctggggtgcctaatgagtgagctaactcacattaattgcgttgcgctcactgcccgctttccagtcgggaaacctgtcgtgccagcggatccgcatctcaattagtcagcaaccatagtcccgcccctaactccgcccatcccgcccctaactccgcccagttccgcccattctccgccccatggctgactaattttttttatttatgcagaggccgaggccgcctcggcctctgagctattccagaagtagtgaggaggcttttttggaggcctaggcttttgcaaaaagctaacttgtttattgcagcttataatggttacaaataaagcaatagcatcacaaatttcacaaataaagcatttttttcactgcattctagttgtggtttgtccaaactcatcaatgtatcttatcatgtctggatccgctgcattaatgaatcggccaacgcgcggggagaggcggtttgcgtattgggcgctcttccgcttcctcgctcactgactcgctgcgctcggtcgttcggctgcggcgagcggtatcagctcactcaaaggcggtaatacggttatccacagaatcaggggataacgcaggaaagaacatgtgagcaaaaggccagcaaaaggccaggaaccgtaaaaaggccgcgttgctggcgtttttccataggctccgcccccctgacgagcatcacaaaaatcgacgctcaagtcagaggtggcgaaacccgacaggactataaagataccaggcgtttccccctggaagctccctcgtgcgctctcctgttccgaccctgccgcttaccggatacctgtccgcctttctcccttcgggaagcgtggcgctttctcatagctcacgctgtaggtatctcagttcggtgtaggtcgttcgctccaagctgggctgtgtgcacgaaccccccgttcagcccgaccgctgcgccttatccggtaactatcgtcttgagtccaacccggtaagacacgacttatcgccactggcagcagccactggtaacaggattagcagagcgaggtatgtaggcggtgctacagagttcttgaagtggtggcctaactacggctacactagaagaacagtatttggtatctgcgctctgctgaagccagttaccttcggaaaaagagttggtagctcttgatccggcaaacaaaccaccgctggtagcggtggtttttttgtttgcaagcagcagattacgcgcagaaaaaaaggatctcaagaagatcctttgatcttttctacggggtctgacgctcagtggaacgaaaactcacgttaagggattttggtcatgagattatcaaaaaggatcttcacctagatccttttaaattaaaaatgaagttttaaatcaatctaaagtatatatgagtaaacttggtctgacagttaccaatgcttaatcagtgaggcacctatctcagcgatctgtctatttcgttcatccatagttgcctgactccccgtcgtgtagataactacgatacgggagggcttaccatctggccccagtgctgcaatgataccgcgagacccacgctcaccggctccagatttatcagcaataaaccagccagccggaagggccgagcgcagaagtggtcctgcaactttatccgcctccatccagtctattaattgttgccgggaagctagagtaagtagttcgccagttaatagtttgcgcaacgttgttgccattgctacaggcatcgtggtgtcacgctcgtcgtttggtatggcttcattcagctccggttcccaacgatcaaggcgagttacatgatcccccatgttgtgcaaaaaagcggttagctccttcggtcctccgatcgttgtcagaagtaagttggccgcagtgttatcactcatggttatggcagcactgcataattctcttactgtcatgccatccgtaagatgcttttctgtgactggtgagtactcaaccaagtcattctgagaatagtgtatgcggcgaccgagttgctcttgcccggcgtcaatacgggataataccgcgccacatagcagaactttaaaagtgctcatcattggaaaacgttcttcggggcgaaaactctcaaggatcttaccgctgttgagatccagttcgatgtaacccactcgtgcacccaactgatcttcagcatcttttactttcaccagcgtttctgggtgagcaaaaacaggaaggcaaaatgccgcaaaaaagggaataagggcgacacggaaatgttgaatactcatactcttcctttttcaatattattgaagcatttatcagggttattgtctcatgagcggatacatatttgaatgtatttagaaaaataaacaaataggggttccgcgcacatttccccgaaaagtgccacctgggtcgacattgattattgactagttattaatagtaatcaattacggggtcattagttcatagcccatatatggagttccgcgttacataacttacggtaaatggcccgcctggctgaccgcccaacgacccccgcccattgacgtcaataatgacgtatgttcccatagtaacgccaatagggactttccattgacgtc

SEQ ID NO: 72 - DNA, 7881 bp, synthetic construct
  source 1..7881: mol_type = other DNA
gttgtttaccctcacaacgttccagtaaccgggcatgttcatcatcagtaacccgtatcgtgagcatcctctctcgtttcatcggtatcattacccccatgaacagaaatcccccttacacggaggcatcagtgaccaaacaggaaaaaaccgcccttaacatggcccgctttatcagaagccagacattaacgcttctggagaaactcaacgagctggacgcggatgaacaggcagacatctgtgaatcgcttcacgaccacgctgatgagctttaccgcagctgcctcgcgcgtttcggtgatgacggtgaaaacctctgacacatgcagctcccggagacggtcacagcttgtctgtaagcggatgccgggagcagacaagcccgtcagggcgcgtcagcgggtgttggcgggtgtcggggcgcagccatgacccagtcacgtagcgatagcggagtgtatactggcttaactatgcggcatcagagcagattgtactgagagtgcaccatatgcggtgtgaaataccgcacagatgcgtaaggagaaaataccgcatcaggcgctcttccgcttcctcgctcactgactcgctgcgctcggtcgttcggctgcggcgagcggtatcagctcactcaaaggcggtaatacggttatccacagaatcaggggataacgcaggaaagaacatgtgagcaaaaggccagcaaaaggccaggaaccgtaaaaaggccgcgttgctggcgtttttccataggctccgcccccctgacgagcatcacaaaaatcgacgctcaagtcagaggtggcgaaacccgacaggactataaagataccaggcgtttccccctggaagctccctcgtgcgctctcctgttccgaccctgccgcttaccggatacctgtccgcctttctcccttcgggaagcgtggcgctttctcatagctcacgctgtaggtatctcagttcggtgtaggtcgttcgctccaagctgggctgtgtgcacgaaccccccgttcagcccgaccgctgcgccttatccggtaactatcgtcttgagtccaacccggtaagacacgacttatcgccactggcagcagccactggtaacaggattagcagagcgaggtatgtaggcggtgctacagagttcttgaagtggtggcctaactacggctacactagaaggacagtatttggtatctgcgctctgctgaagccagttaccttcggaaaaagagttggtagctcttgatccggcaaacaaaccaccgctggtagcggtggtttttttgtttgcaagcagcagattacgcgcagaaaaaaaggatctcaagaagatcctttgatcttttctacggggtctgacgctcagtggaacgaaaactcacgttaagggattttggtcatgagattatcaaaaaggatcttcacctagatccttttaaattaaaaatgaagttttaaatcaagttgcgactgtagagcgttgaccctgacacaatacttacgattaccctgttatccctacgctaccttcggtgaaagtgagtcggcacaatctcgtaatgtgaacactgcttcgccacttattgatagtcgcaacgggagcgatcgctaaaagcagcgattcgtggctcagtcccagagtcgtatctagctagtcaggtagtaaaaggtctcaactaggcagtggcagagcaggattcaaattcagggctgttgtgatgcctccgcagactctgagcgccacctggtggtaatttgtctgtgcctcttctgacgtggaagaacagcaactaacacactaacacggcatttactatgggccagccattgttctaaagccctcgttcacagagaaagttcggttacactgcggatttcgacattgattattgactagttattaatagtaatcaattacggggtcattagttcatagcccatatatggagttccgcgttacataacttacggtaaatggcccgcctggctgaccgcccaacgacccccgcccattgacgtcaataatgacgtatgttcccatagtaacgccaatagggactttccattgacgtcaatgggtggactatttacggtaaactgcccacttggcagtacatcaagtgtatcatatgccaagtacgccccctattgacgtcaatgacggtaaatggcccgcctggcattatgcccagtacatgaccttatgggactttcctacttggcagtacatctacgtattagtcatcgctattaccatgggtcgaggtgagccccacgttctgcttcactctccccatctcccccccctccccacccccaattttgtatttatttattttttaattattttgtgcagcgatgggggcggggggggggggggcgcgcgccaggcggggcggggcggggcgaggggcggggcggggcgaggcggagaggtgcggcggcagccaatcagagcggcgcgctccgaaagtttccttttatggcgaggcggcggcggcggcggccctataaaaagcgaagcgcgcggcgggcgggagtcgctgcgttgccttcgccccgtgccccgctccgcgccgcctcgcgccgcccgccccggctctgactgaccgcgttactcccacaggtgagcgggcgggacggcccttctcctccgggctgtaattagcgcttggtttaatgacggctcgtttcttttctgtggctgcgtgaaagccttaaagggctccgggagggccctttgtgcgggggggagcggctcggggggtgcgtgcgtgtgtgtgtgcgtggggagcgccgcgtgcggcccgcgctgcccggcggctgtgagcgctgcgggcgcggcgcggggctttgtgcgctccgcgtgtgcgcgaggggagcgcggccgggggcggtgccccgcggtgcgggggggctgcgaggggaacaaaggctgcgtgcggggtgtgtgcgtgggggggtgagcagggggtgtgggcgcggcggtcgggctgtaacccccccctgcacccccctccccgagttgctgagcacggcccggcttcgggtgcggggctccgtgcggggcgtggcgcggggctcgccgtgccgggcggggggtggcggcaggtgggggtgccgggcggggcggggccgcctcgggccggggagggctcgggggaggggcgcggcggccccggagcgccggcggctgtcgaggcgcggcgagccgcagccattgccttttatggtaatcgtgcgagagggcgcagggacttcctttgtcccaaatctggcggagccgaaatctgggaggcgccgccgcaccccctctagcgggcgcgggcgaagcggtgcggcgccggcaggaaggaaatgggcggggagggccttcgtgcgtcgccgcgccgccgtccccttctccatctccagcctcggggctgccgcagggggacggctgccttcgggggggacggggcagggcggggttcggcttctggcgtgtgaccggcggctctagagcctctgctaaccatgttcatgccttcttctttttcctacagctcctgggcaacgtgctggttattgtgctgtctcatcattttggcaaaggcacctgtgattgcctcgggagttgaaatacacccagattgccaccatggcctcaccgttgacccgctttctgtcgctgaacctgctgctgctgggtgagtcgattatcctggggagtggagaagctactagtatggatcaagtccaactggtggagtctggtggcgctttggtgcagccaggtggctctctgcgtttgtcctgtgccgcttctggcttcccagtgaaccgctattccatgcgctggtatcgccaggctccaggcaaagagcgtgagtgggtagccggtatgtccagcgcgggtgatcgtagctcctatgaagactccgtgaagggccgtttcaccatcagccgtgacgatgcccgtaacacggtgtatctgcaaatgaacagcttgaaacctgaagatacggccgtgtattactgtaatgtgaacgtgggcttcgagtattggggccaaggcacccaggtcaccgtctccagcactagtaagccacaggcacccgaactccgaatctttccaaagaaaatggacgccgaacttggtcagaaggtggacctggtatgtgaagtgttggggtccgtttcgcaaggatgctcttggctcttccagaactccagctccaaactcccccagcccaccttcgttgtctatatggcttcatcccacaacaagataacgtgggacgagaagctgaattcgtcgaaactgttttctgccatgagggacacgaataataagtacgttctcaccctgaacaagttcagcaaggaaaacgaaggctactatttctgctcagtcatcagcaactcggtgatgtacttcagttctgtcgtgccagtccttcagaaagtgaactctactactaccaagccagtgctgcgaactccctcacctgtgcaccctaccgggacatctcagccccagagaccagaagattgtcggccccgtggctcagtgaaggggaccggattggacttcgcctgtgatatttacatctgggcacccttggccggaatctgcgtggcccttctgctgtccttgatcatcactctcatctgctaccacagccgcggatccaccatggtgagcaagggcgaggaggataacatggccatcatcaaggagttcatgcgcttcaaggtgcacatggagggctccgtgaacggccacgagttcgagatcgagggcgagggcgagggccgcccctacgagggcacccagaccgccaagctgaaggtgaccaagggtggccccctgcccttcgcctgggacatcctgtcccctcagttcatgtacggctccaaggcctacgtgaagcaccccgccgacatccccgactacttgaagctgtccttccccgagggcttcaagtgggagcgcgtgatgaacttcgaggacggcggcgtggtgaccgtgacccaggactcctccctgcaggacggcgagttcatctacaaggtgaagctgcgcggcaccaacttcccctccgacggccccgtaatgcagaagaagaccatgggctgggaggcctcctccgagcggatgtaccccgaggacggcgccctgaagggcgagatcaagcagaggctgaagctgaaggacggcggccactacgacgctgaggtcaagaccacctacaaggccaagaagcccgtgcagctgcccggcgcctacaacgtcaacatcaagttggacatcacctcccacaacgaggactacaccatcgtggaacagtacgaacgcgccgagggccgccactccaccggcggcatggacgagctgtacaagtaattaccaatagtcggcggttatcagcggaccctacgaagttggagtaacgaccttgaagacgagtacagagttccggtttgaatcaacctctggattacaaaatttgtgaaagattgactggtattcttaactatgttgctccttttacgctatgtggatacgctgctttaatgcctttgtatcatgctattgcttcccgtatggctttcattttctcctccttgtataaatcctggttgctgtctctttatgaggagttgtggcccgttgtcaggcaacgtggcgtggtgtgcactgtgtttgctgacgcaacccccactggttggggcattgccaccacctgtcagctcctttccgggactttcgctttccccctccctattgccacggcggaactcatcgccgcctgccttgcccgctgctggacaggggctcggctgttgggcactgacaattccgtggtgttgtcctcgagtctagagggcccgtttaaacccgctgatcagcctcgactgtgccttctagttgccagccatctgttgtttgcccctcccccgtgccttccttgaccctggaaggtgccactcccactgtcctttcctaataaaatgaggaaattgcatcgcattgtctgagtaggtgtcattctattctggggggtggggtggggcaggacagcaagggggaggattgggaagacaatagcaggcatgctggggatgcggtgggctctatggctatgagttcgttccctccttgcctcctggtggtagatagttctccaaccgaagtgtttacggaagatagagcccgctgttagccctgagtctgcgttgtaagagcaataggtccactacgcgatcgcgcttttaccacgaacgataataggttggcgggtcactccaaaaagggtcgtgcggcgatactacaatctcctgttactcgtagggataacagggtaatcctgaaaagtggataaccagcaccgttgtgagtgtctcctagacgtcaggtggcacttttcggggaaatgtgcgcggaacccctatttgtttatttttctaaatacattcaaatatgtatccgctcatgagacaataaccctgataaatgcttcaataatattgaaaaaggaagagtatgagtattcaacatttccgtgtcgcccttattcccttttttgcggcattttgccttcctgtttttgctcacccagaaacgctggtgaaagtaaaagatgctgaagatcagttgggtgcacgagtgggttacatcgaactggatctcaacagcggtaagatccttgagagttttcgccccgaagaacgttttccaatgatgagcacttttaaagttctgctatgtggcgcggtattatcccgtgttgacgccgggcaagagcaactcggtcgccgcatacactattctcagaatgacttggttgagtactcaccagtcacagaaaagcatcttacggatggcatgacagtaagagaattatgcagtgctgccataaccatgagtgataacactgcggccaacttacttctgacaacgatcggaggaccgaaggagctaaccgcttttttgcacaacatgggggatcatgtaactcgccttgatcgttgggaaccggagctgaatgaagccataccaaacgacgagcgtgacaccacgatgcctgcagcaatggcaacaacgttgcgcaaactattaactggcgaactacttactctagcttcccggcaacaattaatagactggatggaggcggataaagttgcaggaccacttctgcgctcggcccttccggctggctggtttattgctgataaatctggagccggtgagcgtgggtctcgcggtatcattgcagcactggggccagatggtaagccctcccgtatcgtagttatctacacgacggggagtcaggcaactatggatgaacgaaatagacagatcgctgagataggtgcctcactgattaagcattggtaactgtcagaccaagtttactcatatatactttagacgcagtccctgtcctgagtagtaaacttccgaatagagtgattctgacaccgtgagtaagcacaggtcgggtcttcaatcatcgtctacggattgggacaccgaggtttctgaactcaacatgatcgtgctcctgtcgttgaggacccggctaggctggcggggttgccttactggttagcagaatgaatcaccgatacgcgagcgaacgtgaagcgactgctgctgcaaaacgtctgcgacctgagcaacaacatgaatggtcttcggtttccgtgtttcgtaaagtctggaaacgcggaagtcagcgccctgcaccattatgttccggatctgcatcgcaggatgctgctggctaccctgtggaacacctacatctgtattaacgaagcgctggcattgaccctgagtgatttttctctggtcccgccgcatccataccgcca

SEQ ID NO: 73 - DNA, 8325 bp, synthetic construct
  source 1..8325: mol_type = other DNA
aacccgtatcgtgagcatcctctctcgtttcatcggtatcattacccccatgaacagaaatcccccttacacggaggcatcagtgaccaaacaggaaaaaaccgcccttaacatggcccgctttatcagaagccagacattaacgcttctggagaaactcaacgagctggacgcggatgaacaggcagacatctgtgaatcgcttcacgaccacgctgatgagctttaccgcagctgcctcgcgcgtttcggtgatgacggtgaaaacctctgacacatgcagctcccggagacggtcacagcttgtctgtaagcggatgccgggagcagacaagcccgtcagggcgcgtcagcgggtgttggcgggtgtcggggcgcagccatgacccagtcacgtagcgatagcggagtgtatactggcttaactatgcggcatcagagcagattgtactgagagtgcaccatatgcggtgtgaaataccgcacagatgcgtaaggagaaaataccgcatcaggcgctcttccgcttcctcgctcactgactcgctgcgctcggtcgttcggctgcggcgagcggtatcagctcactcaaaggcggtaatacggttatccacagaatcaggggataacgcaggaaagaacatgtgagcaaaaggccagcaaaaggccaggaaccgtaaaaaggccgcgttgctggcgtttttccataggctccgcccccctgacgagcatcacaaaaatcgacgctcaagtcagaggtggcgaaacccgacaggactataaagataccaggcgtttccccctggaagctccctcgtgcgctctcctgttccgaccctgccgcttaccggatacctgtccgcctttctcccttcgggaagcgtggcgctttctcatagctcacgctgtaggtatctcagttcggtgtaggtcgttcgctccaagctgggctgtgtgcacgaaccccccgttcagcccgaccgctgcgccttatccggtaactatcgtcttgagtccaacccggtaagacacgacttatcgccactggcagcagccactggtaacaggattagcagagcgaggtatgtaggcggtgctacagagttcttgaagtggtggcctaactacggctacactagaaggacagtatttggtatctgcgctctgctgaagccagttaccttcggaaaaagagttggtagctcttgatccggcaaacaaaccaccgctggtagcggtggtttttttgtttgcaagcagcagattacgcgcagaaaaaaaggatctcaagaagatcctttgatcttttctacggggtctgacgctcagtggaacgaaaactcacgttaagggattttggtcatgagattatcaaaaaggatcttcacctagatccttttaaattaaaaatgaagttttaaatcaagcgatcgccgggttgtattggagacaagaagcacttgctctccaaaagtcggtttgagttatcattaagggagctgcagtggagtaggcggagaaaaggccgcacccttctcaggacgggggaggggagtgttgcaatacctttctgggagttctctgctgcctcctgtcttctgaggaccgccctgggcctggaagattcccttcccccttcttccctcgtgatctgcaactggagtctttctggaagataggcgggagtcttctgggcaggcttaaaggctaacctggtgcgtggggcgttgtcctgcagaggaattgaacaggtgtaaaattggaggggcaagacttcccacagattttcgattgtgttgttaagtattgtaataggggcaaataagggaaatagactaggcactcacctggggttttatgcagcaaaactacaggttattattgcttgtgatccgccctggagaatttttcaccgaggtagattgaagacatgcccacccaaattttaatattcttccacttgcgatccttgctacagtatgaaattacagtatcgtgaattagaatatataagcagaattttaagcattttaaaagagcccagtacttcatgtctgtctctcccacttctgcagccctatcaaagggtattttagcacactcattttagtcccattttcatttgttgtactggcttatccaatccctagacagagcactggcattccctctctcctgatcttagaagtccgatgactcatgaaaccagacagattagtttcatacaccacaaagttgcgactgtagagcgttgaccctgacacaatacttacgataacttcgtataatgtatgctatacgaagttatagtaattcatacaaaaggactcgcccctgccttggggaatcccagggaccgtcgttaaactcccactaacgtagaacccagaattcgatatcgccggctctgcggcctcttccgcgtcttcgccttcgccctcagacgagtcggatctccctttgggccgcctccccgcctgataacttcgtataatgtatgctatacgaagttatcgttacataacttacggtaaatggcccgcctggctgaccgcccaacgacccccgcccattgacgtcaataatgacgtatgttcccatagtaacgccaatagggactttccattgacgtcaatgggtggagtatttacggtaaactgcccacttggcagtacatcaagtgtatcatatgccaagtacgccccctattgacgtcaatgacggtaaatggcccgcctggcattatgcccagtacatgaccttatgggactttcctacttggcagtacatctacgtattagtcatcgctattaccatggtcgaggtgagccccacgttctgcttcactctccccatctcccccccctccccacccccaattttgtatttatttattttttaattattttgtgcagcgatgggggcggggggggggggggggcgcgcgccaggcggggcggggcggggcgaggggcggggcggggcgaggcggagaggtgcggcggcagccaatcagagcggcgcgctccgaaagtttccttttatggcgaggcggcggcggcggcggccctataaaaagcgaagcgcgcggcgggcggggagtcgctgcgacgctgccttcgccccgtgccccgctccgccgccgcctcgcgccgcccgccccggctctgactgaccgcgttactcccacaggtgagcgggcgggacggcccttctcctccgggctgtaattagcgcttggtttaatgacggcttgtttcttttctgtggctgcgtgaaagccttgaggggctccgggagggccctttgtgcggggggagcggctcggggggtgcgtgcgtgtgtgtgtgcgtggggagcgccgcgtgcggctccgcgctgcccggcggctgtgagcgctgcgggcgcggcgcggggctttgtgcgctccgcagtgtgcgcgaggggagcgcggccgggggcggtgccccgcggtgcggggggggctgcgaggggaacaaaggctgcgtgcggggtgtgtgcgtgggggggtgagcagggggtgtgggcgcgtcggtcgggctgcaaccccccctgcacccccctccccgagttgctgagcacggcccggcttcgggtgcggggctccgtacggggcgtggcgcggggctcgccgtgccgggcggggggtggcggcaggtgggggtgccgggcggggcggggccgcctcgggccggggagggctcgggggaggggcgcggcggcccccggagcgccggcggctgtcgaggcgcggcgagccgcagccattgccttttatggtaatcgtgcgagagggcgcagggacttcctttgtcccaaatctgtgcggagccgaaatctgggaggcgccgccgcaccccctctagcgggcgcggggcgaagcggtgcggcgccggcaggaaggaaatgggcggggagggccttcgtgcgtcgccgcgccgccgtccccttctccctctccagcctcggggctgtccgcggggggacggctgccttcgggggggacggggcagggcggggttcggcttctggcgtgtgaccggcggctctagagcctctgctaaccatgttcatgccttcttctttttcctacaggcacctgtgattgcctcgggagttgaaatacacccagattgccaccatgagatctgatccaaaaaagaagagaaaggtagatccaaaaaagaagagaaaggtagatccaaaaaagaagagaaaggtcatggtgagcgtgatcaagcccgagatgaagatgaggtactacatggacggctccgtcaatgggcatgagttcacaatcgagggtgagggcacaggcagaccttacgagggacatcaggagatgacactgcgcgtcacaatggccaagggcgggccaatgcctttcgccttcgacctggtgtcccacgtgttctgttacggccacagaccttttactaaatatccagaagagatcccagactatttcaagcaggcctttcctgagggcctgtcctgggagaggtccctggagttcgaggacggcggctccgcctccgtgagcgcccacatcagcctgaggggcaacaccttctaccacaagtccaagttcaccggcgtgaacttccccgccgacggccccatcatgcagaaccagagcgtggactgggagccctccaccgagaagatcaccgccagcgacggcgtgctgaagggcgacgtgaccatgtacctgaagctggagggcggcggcaaccacaagtgccagttcaagaccacctacaaggccgccaagaagatcctgaagatgcccggcagccactacatcagccacaggctggtgaggaagaccgagggcaacatcaccgagctggtggaggacgccgtggcccactccgccacgaacttctctctgttaaagcaagcaggagacgtggaagaaaaccccggtcctatgaccgagtacaagcccacggtgcgcctcgccacccgcgacgacgtccccagggccgtacgcaccctcgccgccgcgttcgccgactaccccgccacgcgccacaccgtcgatccggaccgccacatcgagcgggtcaccgagctgcaagaactcttcctcacgcgcgtcgggctcgacatcggcaaggtgtgggtcgcggacgacggcgccgcggtggcggtctggaccacgccggagagcgtcgaagcgggggcggtgttcgccgagatcggcccgcgcatggccgagttgagcggttcccggctggccgcgcagcaacagatggaaggcctcctggcgccgcaccggcccaaggagcccgcgtggttcctggccaccgtcggagtctcgcccgaccaccagggcaagggtctgggcagcgccgtcgtgctccccggagtggaggcggccgagcgcgccggggtgcccgccttcctggagacctccgcgccccgcaacctccccttctacgagcggctcggcttcaccgtcaccgccgacgtcgaggtgcccgaaggaccgcgcacctggtgcatgacccgcaagcccggtgcctaattaccaatagtcggcggttatcagcggaccctacgaagttctgtgccttctagttgccagccatctgttgtttgcccctcccccgtgccttccttgaccctggaaggtgccactcccactgtcctttcctaataaaatgaggaaattgcatcgcattgtctgagtaggtgtcattctattctggggggtggggtggggcaggacagcaagggggaggattgggaagagaatagcaggcatgctggggagcggccgcaggaacccctagtgatggagttggccactccctctctgcgcgctcgctcgctcactgaggccgggcgaccaaaggtcgcccgacgcccgggctttgcccgggcggcctcagtgagcgagcgagcgcgcagctgcctgcaggcctgaaaagtggataaccagcaccgttgtgagtgtctccttcgaggctgtagctggggcctttaacattgcagtttttttattcttcagtacactttgttgattctttgccttgatcttgacttcaggttctatcaccaccccctcagatggtgttccacacttgggcctattcacagttcagagagctttacaacaatagatgtattgagaatccaacctaaagttcagctttttactcccatgaatgcctctttcctttttctccatttataaactgagccatttcctgttaatggtttacagatgaatatctcctcccccaatatcacctgatgtatcttacattttgccaggcttagattgtcttaaaaggtacataaattaacatgtgaaatttactccttaatgcttcagtggatttcatgagtgcagtacagaagactggtaatgggctaataacttttatttcattatttctcatatactcacttaactcttgagctacatggaattgattcctgcttactaaaatcattatactcctctataaaagttagttccttctggaatgcagaatatataaactcttaaaggtttagttgtttgtctttcctgacctaaggtccagtgagcctgtatttttttctatttaagcggtgctttctcttggactggcttgactcatgttcatgttattgctgatttaaatgtgattttgctaagtatcttctggacataattttgcttgacttgttgccagacacaagtaaaatggagtaagcagcaaaaatgtatttgtgaagcttggtttttagggtggtgtgcgcaggtgctatccgcgatcgcagacgtcaggtggcacttttcggggaaatgtgcgcggaacccctatttgtttatttttctaaatacattcaaatatgtatccgctcatgagacaataaccctgataaatgcttcaataatattgaaaaaggaagagtatgagtattcaacatttccgtgtcgcccttattcccttttttgcggcattttgccttcctgtttttgctcacccagaaacgctggtgaaagtaaaagatgctgaagatcagttgggtgcacgagtgggttacatcgaactggatctcaacagcggtaagatccttgagagttttcgccccgaagaacgttttccaatgatgagcacttttaaagttctgctatgtggcgcggtattatcccgtgttgacgccgggcaagagcaactcggtcgccgcatacactattctcagaatgacttggttgagtactcaccagtcacagaaaagcatcttacggatggcatgacagtaagagaattatgcagtgctgccataaccatgagtgataacactgcggccaacttacttctgacaacgatcggaggaccgaaggagctaaccgcttttttgcacaacatgggggatcatgtaactcgccttgatcgttgggaaccggagctgaatgaagccataccaaacgacgagcgtgacaccacgatgcctgcagcaatggcaacaacgttgcgcaaactattaactggcgaactacttactctagcttcccggcaacaattaatagactggatggaggcggataaagttgcaggaccacttctgcgctcggcccttccggctggctggtttattgctgataaatctggagccggtgagcgtgggtctcgcggtatcattgcagcactggggccagatggtaagccctcccgtatcgtagttatctacacgacggggagtcaggcaactatggatgaacgaaatagacagatcgctgagataggtgcctcactgattaagcattggtaactgtcagaccaagtttactcatatatactttagacgcagtccctgtcctgagtagtaaacttccgaatagagtgattctgacaccgtgagtaagcacaggtcgggtcttcaatcatcgtctacggattgggacaccgaggtttctgaactcaacatgatcgtgctcctgtcgttgaggacccggctaggctggcggggttgccttactggttagcagaatgaatcaccgatacgcgagcgaacgtgaagcgactgctgctgcaaaacgtctgcgacctgagcaacaacatgaatggtcttcggtttccgtgtttcgtaaagtctggaaacgcggaagtcagcgccctgcaccattatgttccggatctgcatcgcaggatgctgctggctaccctgtggaacacctacatctgtattaacgaagcgctggcattgaccctgagtgatttttctctggtcccgccgcatccataccgccagttgtttaccctcacaacgttccagtaaccgggcatgttcatcatcagt

SEQ ID NO: 74 - DNA, 8325 bp, synthetic construct
  source 1..8325: mol_type = other DNA
tattttttaattattttgtgcagcgatgggggcggggggggggggggggcgcgcgccaggcggggcggggcggggcgaggggcggggcggggcgaggcggagaggtgcggcggcagccaatcagagcggcgcgctccgaaagtttccttttatggcgaggcggcggcggcggcggccctataaaaagcgaagcgcgcggcgggcggggagtcgctgcgacgctgccttcgccccgtgccccgctccgccgccgcctcgcgccgcccgccccggctctgactgaccgcgttactcccacaggtgagcgggcgggacggcccttctcctccgggctgtaattagcgcttggtttaatgacggcttgtttcttttctgtggctgcgtgaaagccttgaggggctccgggagggccctttgtgcggggggagcggctcggggggtgcgtgcgtgtgtgtgtgcgtggggagcgccgcgtgcggctccgcgctgcccggcggctgtgagcgctgcgggcgcggcgcggggctttgtgcgctccgcagtgtgcgcgaggggagcgcggccgggggcggtgccccgcggtgcggggggggctgcgaggggaacaaaggctgcgtgcggggtgtgtgcgtgggggggtgagcagggggtgtgggcgcgtcggtcgggctgcaaccccccctgcacccccctccccgagttgctgagcacggcccggcttcgggtgcggggctccgtacggggcgtggcgcggggctcgccgtgccgggcggggggtggcggcaggtgggggtgccgggcggggcggggccgcctcgggccggggagggctcgggggaggggcgcggcggcccccggagcgccggcggctgtcgaggcgcggcgagccgcagccattgccttttatggtaatcgtgcgagagggcgcagggacttcctttgtcccaaatctgtgcggagccgaaatctgggaggcgccgccgcaccccctctagcgggcgcggggcgaagcggtgcggcgccggcaggaaggaaatgggcggggagggccttcgtgcgtcgccgcgccgccgtccccttctccctctccagcctcggggctgtccgcggggggacggctgccttcgggggggacggggcagggcggggttcggcttctggcgtgtgaccggcggctctagagcctctgctaaccatgttcatgccttcttctttttcctacaggcacctgtgattgcctcgggagttgaaatacacccagattgccaccatgagatctgatccaaaaaagaagagaaaggtagatccaaaaaagaagagaaaggtagatccaaaaaagaagagaaaggtcatggtgagcgtgatcaagcccgagatgaagatgaggtactacatggacggctccgtcaatgggcatgagttcacaatcgagggtgagggcacaggcagaccttacgagggacatcaggagatgacactgcgcgtcacaatggccaagggcgggccaatgcctttcgccttcgacctggtgtcccacgtgttctgttacggccacagaccttttactaaatatccagaagagatcccagactatttcaagcaggcctttcctgagggcctgtcctgggagaggtccctggagttcgaggacggcggctccgcctccgtgagcgcccacatcagcctgaggggcaacaccttctaccacaagtccaagttcaccggcgtgaacttccccgccgacggccccatcatgcagaaccagagcgtggactgggagccctccaccgagaagatcaccgccagcgacggcgtgctgaagggcgacgtgaccatgtacctgaagctggagggcggcggcaaccacaagtgccagttcaagaccacctacaaggccgccaagaagatcctgaagatgcccggcagccactacatcagccacaggctggtgaggaagaccgagggcaacatcaccgagctggtggaggacgccgtggcccactccgccacgaacttctctctgttaaagcaagcaggagacgtggaagaaaaccccggtcctatgaccgagtacaagcccacggtgcgcctcgccacccgcgacgacgtccccagggccgtacgcaccctcgccgccgcgttcgccgactaccccgccacgcgccacaccgtcgatccggaccgccacatcgagcgggtcaccgagctgcaagaactcttcctcacgcgcgtcgggctcgacatcggcaaggtgtgggtcgcggacgacggcgccgcggtggcggtctggaccacgccggagagcgtcgaagcgggggcggtgttcgccgagatcggcccgcgcatggccgagttgagcggttcccggctggccgcgcagcaacagatggaaggcctcctggcgccgcaccggcccaaggagcccgcgtggttcctggccaccgtcggagtctcgcccgaccaccagggcaagggtctgggcagcgccgtcgtgctccccggagtggaggcggccgagcgcgccggggtgcccgccttcctggagacctccgcgccccgcaacctccccttctacgagcggctcggcttcaccgtcaccgccgacgtcgaggtgcccgaaggaccgcgcacctggtgcatgacccgcaagcccggtgcctaattaccaatagtcggcggttatcagcggaccctacgaagttctgtgccttctagttgccagccatctgttgtttgcccctcccccgtgccttccttgaccctggaaggtgccactcccactgtcctttcctaataaaatgaggaaattgcatcgcattgtctgagtaggtgtcattctattctggggggtggggtggggcaggacagcaagggggaggattgggaagagaatagcaggcatgctggggagcggccgcaggaacccctagtgatggagttggccactccctctctgcgcgctcgctcgctcactgaggccgggcgaccaaaggtcgcccgacgcccgggctttgcccgggcggcctcagtgagcgagcgagcgcgcagctgcctgcaggcctgaaaagtggataaccagcaccgttgtgagtgtctcctgattggtgacagaaaagccccatccttaggcctcctccttcctagtctcctgatattgggtctaacccccacctcctgttaggcagattccttatctggtgacacacccccatttcctggagccatctctctccttgccagaacctctaaggtttgcttacgatggagccagagaggatcctgggagggagagcttggcagggggtgggagggaagggggggatgcgtgacctgcccggttctcagtggccaccctgcgctaccctctcccagaacctgagctgctctgacgcggccgtctggtgcgtttcactgatcctggtgctgcagcttccttacacttcccaagaggagaagcagtttggaaaaacaaaatcagaataagttggtcctgagttctaactttggctcttcacctttctagtccccaatttatattgttcctccgtgcgtcagttttacctgtgagataaggccagtagccagccccgtcctggcagggctgtggtgaggaggggggtgtccgtgtggaaaactccctttgtgagaatggtgcgtcctaggtgttcaccaggtcgtggccgcctctactccctttctctttctccatccttctttccttaaagagtccccagtgctatctgggacatattcctccgcccagagcagggtcccgcttccctaaggccctgctctgggcttctgggtttgagtccttggcaagcccaggagaggcgctcaggcttccctgtcccccttcctcgtccaccatctcatgcccctggctctcctgccccttcgcgatcgcagacgtcaggtggcacttttcggggaaatgtgcgcggaacccctatttgtttatttttctaaatacattcaaatatgtatccgctcatgagacaataaccctgataaatgcttcaataatattgaaaaaggaagagtatgagtattcaacatttccgtgtcgcccttattcccttttttgcggcattttgccttcctgtttttgctcacccagaaacgctggtgaaagtaaaagatgctgaagatcagttgggtgcacgagtgggttacatcgaactggatctcaacagcggtaagatccttgagagttttcgccccgaagaacgttttccaatgatgagcacttttaaagttctgctatgtggcgcggtattatcccgtgttgacgccgggcaagagcaactcggtcgccgcatacactattctcagaatgacttggttgagtactcaccagtcacagaaaagcatcttacggatggcatgacagtaagagaattatgcagtgctgccataaccatgagtgataacactgcggccaacttacttctgacaacgatcggaggaccgaaggagctaaccgcttttttgcacaacatgggggatcatgtaactcgccttgatcgttgggaaccggagctgaatgaagccataccaaacgacgagcgtgacaccacgatgcctgcagcaatggcaacaacgttgcgcaaactattaactggcgaactacttactctagcttcccggcaacaattaatagactggatggaggcggataaagttgcaggaccacttctgcgctcggcccttccggctggctggtttattgctgataaatctggagccggtgagcgtgggtctcgcggtatcattgcagcactggggccagatggtaagccctcccgtatcgtagttatctacacgacggggagtcaggcaactatggatgaacgaaatagacagatcgctgagataggtgcctcactgattaagcattggtaactgtcagaccaagtttactcatatatactttagacgcagtccctgtcctgagtagtaaacttccgaatagagtgattctgacaccgtgagtaagcacaggtcgggtcttcaatcatcgtctacggattgggacaccgaggtttctgaactcaacatgatcgtgctcctgtcgttgaggacccggctaggctggcggggttgccttactggttagcagaatgaatcaccgatacgcgagcgaacgtgaagcgactgctgctgcaaaacgtctgcgacctgagcaacaacatgaatggtcttcggtttccgtgtttcgtaaagtctggaaacgcggaagtcagcgccctgcaccattatgttccggatctgcatcgcaggatgctgctggctaccctgtggaacacctacatctgtattaacgaagcgctggcattgaccctgagtgatttttctctggtcccgccgcatccataccgccagttgtttaccctcacaacgttccagtaaccgggcatgttcatcatcagtaacccgtatcgtgagcatcctctctcgtttcatcggtatcattacccccatgaacagaaatcccccttacacggaggcatcagtgaccaaacaggaaaaaaccgcccttaacatggcccgctttatcagaagccagacattaacgcttctggagaaactcaacgagctggacgcggatgaacaggcagacatctgtgaatcgcttcacgaccacgctgatgagctttaccgcagctgcctcgcgcgtttcggtgatgacggtgaaaacctctgacacatgcagctcccggagacggtcacagcttgtctgtaagcggatgccgggagcagacaagcccgtcagggcgcgtcagcgggtgttggcgggtgtcggggcgcagccatgacccagtcacgtagcgatagcggagtgtatactggcttaactatgcggcatcagagcagattgtactgagagtgcaccatatgcggtgtgaaataccgcacagatgcgtaaggagaaaataccgcatcaggcgctcttccgcttcctcgctcactgactcgctgcgctcggtcgttcggctgcggcgagcggtatcagctcactcaaaggcggtaatacggttatccacagaatcaggggataacgcaggaaagaacatgtgagcaaaaggccagcaaaaggccaggaaccgtaaaaaggccgcgttgctggcgtttttccataggctccgcccccctgacgagcatcacaaaaatcgacgctcaagtcagaggtggcgaaacccgacaggactataaagataccaggcgtttccccctggaagctccctcgtgcgctctcctgttccgaccctgccgcttaccggatacctgtccgcctttctcccttcgggaagcgtggcgctttctcatagctcacgctgtaggtatctcagttcggtgtaggtcgttcgctccaagctgggctgtgtgcacgaaccccccgttcagcccgaccgctgcgccttatccggtaactatcgtcttgagtccaacccggtaagacacgacttatcgccactggcagcagccactggtaacaggattagcagagcgaggtatgtaggcggtgctacagagttcttgaagtggtggcctaactacggctacactagaaggacagtatttggtatctgcgctctgctgaagccagttaccttcggaaaaagagttggtagctcttgatccggcaaacaaaccaccgctggtagcggtggtttttttgtttgcaagcagcagattacgcgcagaaaaaaaggatctcaagaagatcctttgatcttttctacggggtctgacgctcagtggaacgaaaactcacgttaagggattttggtcatgagattatcaaaaaggatcttcacctagatccttttaaattaaaaatgaagttttaaatcaagcgatcgccattctctcccctgggcctgtgccgctttctgtctgcagcttgtggcctgggtcacctctacggctggcccagatccttccctgccgcctccttcaggttccgtcttcctccactccctcttccccttgctctctgctgtgttgctgcccaaggatgctctttccggagcacttccttctcggcgctgcaccacgtgatgtcctctgagcggatcctccccgtgtctgggtcctctccgggcatctctcctccctcacccaaccccatgccgtcttcactcgctgggttcccttttccttctccttctggggcctgtgccatctctcgtttcttaggatggccttctccgacggatgtctcccttgcgtcccgcctccccttcttgtaggcctgcatcatcaccgtttttctggacaaccccaaagtaccccgtctccctggctttagccacctctccatcctcttgctttctttgcctggacaccccgttctcctgtggattcgggtcacctctcactcctttcatttgggcagctcccctaccccccttacctctctagtctgtgctagctcttccagccccctgtcatggcatcttccaggggtccgagagctcagctagtcttcttcctccaacccgggcccctatgtccacttcaggacagcatgtttgctgcctccagggatcctgtgtccccgagctgggaccaccttatattcccagggccggttaatgtggctctggttctgggtacttttatctgtcccctccaccccacagtggggccactagggacaggttgcgactgtagagcgttgaccctgacacaatacttacgataacttcgtataatgtatgctatacgaagttatagtaattcatacaaaaggactcgcccctgccttggggaatcccagggaccgtcgttaaactcccactaacgtagaacccagaattcgatatcgccggctctgcggcctcttccgcgtcttcgccttcgccctcagacgagtcggatctccctttgggccgcctccccgcctgataacttcgtataatgtatgctatacgaagttatcgttacataacttacggtaaatggcccgcctggctgaccgcccaacgacccccgcccattgacgtcaataatgacgtatgttcccatagtaacgccaatagggactttccattgacgtcaatgggtggagtatttacggtaaactgcccacttggcagtacatcaagtgtatcatatgccaagtacgccccctattgacgtcaatgacggtaaatggcccgcctggcattatgcccagtacatgaccttatgggactttcctacttggcagtacatctacgtattagtcatcgctattaccatggtcgaggtgagccccacgttctgcttcactctccccatctcccccccctccccacccccaattttgtatttatt

SEQ ID NO: 75 - DNA, 8934 bp, synthetic construct
  source 1..8934: mol_type = other DNA
aacccgtatcgtgagcatcctctctcgtttcatcggtatcattacccccatgaacagaaatcccccttacacggaggcatcagtgaccaaacaggaaaaaaccgcccttaacatggcccgctttatcagaagccagacattaacgcttctggagaaactcaacgagctggacgcggatgaacaggcagacatctgtgaatcgcttcacgaccacgctgatgagctttaccgcagctgcctcgcgcgtttcggtgatgacggtgaaaacctctgacacatgcagctcccggagacggtcacagcttgtctgtaagcggatgccgggagcagacaagcccgtcagggcgcgtcagcgggtgttggcgggtgtcggggcgcagccatgacccagtcacgtagcgatagcggagtgtatactggcttaactatgcggcatcagagcagattgtactgagagtgcaccatatgcggtgtgaaataccgcacagatgcgtaaggagaaaataccgcatcaggcgctcttccgcttcctcgctcactgactcgctgcgctcggtcgttcggctgcggcgagcggtatcagctcactcaaaggcggtaatacggttatccacagaatcaggggataacgcaggaaagaacatgtgagcaaaaggccagcaaaaggccaggaaccgtaaaaaggccgcgttgctggcgtttttccataggctccgcccccctgacgagcatcacaaaaatcgacgctcaagtcagaggtggcgaaacccgacaggactataaagataccaggcgtttccccctggaagctccctcgtgcgctctcctgttccgaccctgccgcttaccggatacctgtccgcctttctcccttcgggaagcgtggcgctttctcatagctcacgctgtaggtatctcagttcggtgtaggtcgttcgctccaagctgggctgtgtgcacgaaccccccgttcagcccgaccgctgcgccttatccggtaactatcgtcttgagtccaacccggtaagacacgacttatcgccactggcagcagccactggtaacaggattagcagagcgaggtatgtaggcggtgctacagagttcttgaagtggtggcctaactacggctacactagaaggacagtatttggtatctgcgctctgctgaagccagttaccttcggaaaaagagttggtagctcttgatccggcaaacaaaccaccgctggtagcggtggtttttttgtttgcaagcagcagattacgcgcagaaaaaaaggatctcaagaagatcctttgatcttttctacggggtctgacgctcagtggaacgaaaactcacgttaagggattttggtcatgagattatcaaaaaggatcttcacctagatccttttaaattaaaaatgaagttttaaatcaagcgatcgccgggttgtattggagacaagaagcacttgctctccaaaagtcggtttgagttatcattaagggagctgcagtggagtaggcggagaaaaggccgcacccttctcaggacgggggaggggagtgttgcaatacctttctgggagttctctgctgcctcctgtcttctgaggaccgccctgggcctggaagattcccttcccccttcttccctcgtgatctgcaactggagtctttctggaagataggcgggagtcttctgggcaggcttaaaggctaacctggtgcgtggggcgttgtcctgcagaggaattgaacaggtgtaaaattggaggggcaagacttcccacagattttcgattgtgttgttaagtattgtaataggggcaaataagggaaatagactaggcactcacctggggttttatgcagcaaaactacaggttattattgcttgtgatccgccctggagaatttttcaccgaggtagattgaagacatgcccacccaaattttaatattcttccacttgcgatccttgctacagtatgaaattacagtatcgtgaattagaatatataagcagaattttaagcattttaaaagagcccagtacttcatgtctgtctctcccacttctgcagccctatcaaagggtattttagcacactcattttagtcccattttcatttgttgtactggcttatccaatccctagacagagcactggcattccctctctcctgatcttagaagtccgatgactcatgaaaccagacagattagtttcatacaccacaaagttgcgactgtagagcgttgaccctgacacaatacttacgataacttcgtataatgtatgctatacgaagttatagtaattcatacaaaaggactcgcccctgccttggggaatcccagggaccgtcgttaaactcccactaacgtagaacccagaattcgatatcgccggctctgcggcctcttccgcgtcttcgccttcgccctcagacgagtcggatctccctttgggccgcctccccgcctgataacttcgtataatgtatgctatacgaagttatcgttacataacttacggtaaatggcccgcctggctgaccgcccaacgacccccgcccattgacgtcaataatgacgtatgttcccatagtaacgccaatagggactttccattgacgtcaatgggtggagtatttacggtaaactgcccacttggcagtacatcaagtgtatcatatgccaagtacgccccctattgacgtcaatgacggtaaatggcccgcctggcattatgcccagtacatgaccttatgggactttcctacttggcagtacatctacgtattagtcatcgctattaccatggtcgaggtgagccccacgttctgcttcactctccccatctcccccccctccccacccccaattttgtatttatttattttttaattattttgtgcagcgatgggggcggggggggggggggggcgcgcgccaggcggggcggggcggggcgaggggcggggcggggcgaggcggagaggtgcggcggcagccaatcagagcggcgcgctccgaaagtttccttttatggcgaggcggcggcggcggcggccctataaaaagcgaagcgcgcggcgggcggggagtcgctgcgacgctgccttcgccccgtgccccgctccgccgccgcctcgcgccgcccgccccggctctgactgaccgcgttactcccacaggtgagcgggcgggacggcccttctcctccgggctgtaattagcgcttggtttaatgacggcttgtttcttttctgtggctgcgtgaaagccttgaggggctccgggagggccctttgtgcggggggagcggctcggggggtgcgtgcgtgtgtgtgtgcgtggggagcgccgcgtgcggctccgcgctgcccggcggctgtgagcgctgcgggcgcggcgcggggctttgtgcgctccgcagtgtgcgcgaggggagcgcggccgggggcggtgccccgcggtgcggggggggctgcgaggggaacaaaggctgcgtgcggggtgtgtgcgtgggggggtgagcagggggtgtgggcgcgtcggtcgggctgcaaccccccctgcacccccctccccgagttgctgagcacggcccggcttcgggtgcggggctccgtacggggcgtggcgcggggctcgccgtgccgggcggggggtggcggcaggtgggggtgccgggcggggcggggccgcctcgggccggggagggctcgggggaggggcgcggcggcccccggagcgccggcggctgtcgaggcgcggcgagccgcagccattgccttttatggtaatcgtgcgagagggcgcagggacttcctttgtcccaaatctgtgcggagccgaaatctgggaggcgccgccgcaccccctctagcgggcgcggggcgaagcggtgcggcgccggcaggaaggaaatgggcggggagggccttcgtgcgtcgccgcgccgccgtccccttctccctctccagcctcggggctgtccgcggggggacggctgccttcgggggggacggggcagggcggggttcggcttctggcgtgtgaccggcggctctagagcctctgctaaccatgttcatgccttcttctttttcctacaggcacctgtgattgcctcgggagttgaaatacacccagattgccaccatgagatctgatccaaaaaagaagagaaaggtagatccaaaaaagaagagaaaggtagatccaaaaaagaagagaaaggtcatggtgagcgtgatcaagcccgagatgaagatgaggtactacatggacggctccgtcaatgggcatgagttcacaatcgagggtgagggcacaggcagaccttacgagggacatcaggagatgacactgcgcgtcacaatggccaagggcgggccaatgcctttcgccttcgacctggtgtcccacgtgttctgttacggccacagaccttttactaaatatccagaagagatcccagactatttcaagcaggcctttcctgagggcctgtcctgggagaggtccctggagttcgaggacggcggctccgcctccgtgagcgcccacatcagcctgaggggcaacaccttctaccacaagtccaagttcaccggcgtgaacttccccgccgacggccccatcatgcagaaccagagcgtggactgggagccctccaccgagaagatcaccgccagcgacggcgtgctgaagggcgacgtgaccatgtacctgaagctggagggcggcggcaaccacaagtgccagttcaagaccacctacaaggccgccaagaagatcctgaagatgcccggcagccactacatcagccacaggctggtgaggaagaccgagggcaacatcaccgagctggtggaggacgccgtggcccactccgccacgaacttctctctgttaaagcaagcaggagacgtggaagaaaaccccggtcctatgaccgagtacaagcccacggtgcgcctcgccacccgcgacgacgtccccagggccgtacgcaccctcgccgccgcgttcgccgactaccccgccacgcgccacaccgtcgatccggaccgccacatcgagcgggtcaccgagctgcaagaactcttcctcacgcgcgtcgggctcgacatcggcaaggtgtgggtcgcggacgacggcgccgcggtggcggtctggaccacgccggagagcgtcgaagcgggggcggtgttcgccgagatcggcccgcgcatggccgagttgagcggttcccggctggccgcgcagcaacagatggaaggcctcctggcgccgcaccggcccaaggagcccgcgtggttcctggccaccgtcggagtctcgcccgaccaccagggcaagggtctgggcagcgccgtcgtgctccccggagtggaggcggccgagcgcgccggggtgcccgccttcctggagacctccgcgccccgcaacctccccttctacgagcggctcggcttcaccgtcaccgccgacgtcgaggtgcccgaaggaccgcgcacctggtgcatgacccgcaagcccggtgccgggtccggaggagagggcagaggaagtctcctaacatgcggtgacgtggaggagaatcctggcccaatggtagagatgctgccaactgtcgctgtgctggtcttggcagtgtccgtggttgccaaggataacaccacgctgcaggaattcgccaccatgcaggttcaactggtggaaagcggcggtgctctggtacaaccgggcggtagtctgcgcctgagctgtgccgcaagcggtttcccagtcaaccgctactctatgcgttggtatcgccaggcgcctggtaaagaacgtgaatgggttgccggcatgagcagtgcgggcgatcgttctagttacgaggactctgttaaaggtcgttttacaattagccgtgatgatgcgcgcaataccgtgtatctgcaaatgaacagtctgaagccggaggacaccgcagtatattattgcaatgtcaacgtggggtttgaatattggggccaggggactcaggtgacggtgagctctcaactcgagaatggcggcataagcctgctggttcagaacacatcctggatgctgctgctgctgctttccctctccctcctccaagccctggacttcatttctctgtaattaccaatagtcggcggttatcagcggaccctacgaagttctgtgccttctagttgccagccatctgttgtttgcccctcccccgtgccttccttgaccctggaaggtgccactcccactgtcctttcctaataaaatgaggaaattgcatcgcattgtctgagtaggtgtcattctattctggggggtggggtggggcaggacagcaagggggaggattgggaagagaatagcaggcatgctggggagcggccgcaggaacccctagtgatggagttggccactccctctctgcgcgctcgctcgctcactgaggccgggcgaccaaaggtcgcccgacgcccgggctttgcccgggcggcctcagtgagcgagcgagcgcgcagctgcctgcaggcctgaaaagtggataaccagcaccgttgtgagtgtctccttcgaggctgtagctggggcctttaacattgcagtttttttattcttcagtacactttgttgattctttgccttgatcttgacttcaggttctatcaccaccccctcagatggtgttccacacttgggcctattcacagttcagagagctttacaacaatagatgtattgagaatccaacctaaagttcagctttttactcccatgaatgcctctttcctttttctccatttataaactgagccatttcctgttaatggtttacagatgaatatctcctcccccaatatcacctgatgtatcttacattttgccaggcttagattgtcttaaaaggtacataaattaacatgtgaaatttactccttaatgcttcagtggatttcatgagtgcagtacagaagactggtaatgggctaataacttttatttcattatttctcatatactcacttaactcttgagctacatggaattgattcctgcttactaaaatcattatactcctctataaaagttagttccttctggaatgcagaatatataaactcttaaaggtttagttgtttgtctttcctgacctaaggtccagtgagcctgtatttttttctatttaagcggtgctttctcttggactggcttgactcatgttcatgttattgctgatttaaatgtgattttgctaagtatcttctggacataattttgcttgacttgttgccagacacaagtaaaatggagtaagcagcaaaaatgtatttgtgaagcttggtttttagggtggtgtgcgcaggtgctatccgcgatcgcagacgtcaggtggcacttttcggggaaatgtgcgcggaacccctatttgtttatttttctaaatacattcaaatatgtatccgctcatgagacaataaccctgataaatgcttcaataatattgaaaaaggaagagtatgagtattcaacatttccgtgtcgcccttattcccttttttgcggcattttgccttcctgtttttgctcacccagaaacgctggtgaaagtaaaagatgctgaagatcagttgggtgcacgagtgggttacatcgaactggatctcaacagcggtaagatccttgagagttttcgccccgaagaacgttttccaatgatgagcacttttaaagttctgctatgtggcgcggtattatcccgtgttgacgccgggcaagagcaactcggtcgccgcatacactattctcagaatgacttggttgagtactcaccagtcacagaaaagcatcttacggatggcatgacagtaagagaattatgcagtgctgccataaccatgagtgataacactgcggccaacttacttctgacaacgatcggaggaccgaaggagctaaccgcttttttgcacaacatgggggatcatgtaactcgccttgatcgttgggaaccggagctgaatgaagccataccaaacgacgagcgtgacaccacgatgcctgcagcaatggcaacaacgttgcgcaaactattaactggcgaactacttactctagcttcccggcaacaattaatagactggatggaggcggataaagttgcaggaccacttctgcgctcggcccttccggctggctggtttattgctgataaatctggagccggtgagcgtgggtctcgcggtatcattgcagcactggggccagatggtaagccctcccgtatcgtagttatctacacgacggggagtcaggcaactatggatgaacgaaatagacagatcgctgagataggtgcctcactgattaagcattggtaactgtcagaccaagtttactcatatatactttagacgcagtccctgtcctgagtagtaaacttccgaatagagtgattctgacaccgtgagtaagcacaggtcgggtcttcaatcatcgtctacggattgggacaccgaggtttctgaactcaacatgatcgtgctcctgtcgttgaggacccggctaggctggcggggttgccttactggttagcagaatgaatcaccgatacgcgagcgaacgtgaagcgactgctgctgcaaaacgtctgcgacctgagcaacaacatgaatggtcttcggtttccgtgtttcgtaaagtctggaaacgcggaagtcagcgccctgcaccattatgttccggatctgcatcgcaggatgctgctggctaccctgtggaacacctacatctgtattaacgaagcgctggcattgaccctgagtgatttttctctggtcccgccgcatccataccgccagttgtttaccctcacaacgttccagtaaccgggcatgttcatcatcagt

SEQ ID NO: 76 - DNA, 9651 bp, synthetic construct
  source 1..9651: mol_type = other DNA
agatcaaaggatcttcttgagatcctttttttctgcgcgtaatctgctgcttgcaaacaaaaaaaccaccgctaccagcggtggtttgtttgccggatcaagagctaccaactctttttccgaaggtaactggcttcagcagagcgcagataccaaatactgtccttctagtgtagccgtagttaggccaccacttcaagaactctgtagcaccgcctacatacctcgctctgctaatcctgttaccagtggctgctgccagtggcgataagtcgtgtcttaccgggttggactcaagacgatagttaccggataaggcgcagcggtcgggctgaacggggggttcgtgcacacagcccagcttggagcgaacgacctacaccgaactgagatacctacagcgtgagctatgagaaagcgccacgcttcccgaagggagaaaggcggacaggtatccggtaagcggcagggtcggaacaggagagcgcacgagggagcttccagggggaaacgcctggtatctttatagtcctgtcgggtttcgccacctctgacttgagcgtcgatttttgtgatgctcgtcaggggggcggagcctatggaaaaacgccagcaacgcggcctttttacggttcctggccttttgctggccttttgctcacatgttctttcctgcgttatcccctgattctgtggataaccgtattaccgcctttgagtgagctgataccgctcgccgcagccgaacgaccgagcgcagcgagtcagtgagcgaggaagcggaagagcgcccaatacgcaaaccgcctctccccgcgcgttggccgattcattaatgcagctggcacgacaggtttcccgactggaaagcgggcagtgagcgcaacgcaattaatgtgagttagctcactcattaggcaccccaggctttacactttatgcttccggctcgtatgttgtgtggaattgtgagcggataacaatttcacacaggaaacagctatgaccatgattacgccaagcgcgcaattaaccctcactaaagggaacaaaagctggagctccaccgcggggcgcgccgcagctagattaaccctagaaagatagtctgcgtaaaattgacgcatgcattcttgaaatattgctctctctttctaaatagcgcgaatccgtcgctgtgcatttaggacatctcagtcgccgcttggagctcccgtgaggcgtgcttgtcaatgcggtaagtgtcactgattttgaactataacaaccgcgtgagtcaaaatgacgcatgattatcttttacgtgacttttaagatttaactcatacgataattatattgttatttcgtgttctacttacgtgataacttattatatatatattttcttgttatagatgggaattcagacatgataagatacattgatgagtttggacaaaccacaactagaatgcagtgaaaaaaatgctttatttgtgaaatttgtgatgctattgctttatttgtaaccattataagctgcaataaacaagtttcgaggtcgagtgtcagtcctgctcctcggccacgaagtcgttacataacttacggtaaatggcccgcctggctgaccgcccaacgacccccgcccattgacgtcaataatgacgtatgttcccatagtaacgccaatagggactttccattgacgtcaatgggtggagtatttacggtaaactgcccacttggcagtacatcaagtgtatcatatgccaagtacgccccctattgacgtcaatgacggtaaatggcccgcctggcattatgcccagtacatgaccttatgggactttcctacttggcagtacatctacgtattagtcatcgctattaccatggtcgaggtgagccccacgttctgcttcactctccccatctcccccccctccccacccccaattttgtatttatttattttttaattattttgtgcagcgatgggggcggggggggggggggggcgcgcgccaggcggggcggggcggggcgaggggcggggcggggcgaggcggagaggtgcggcggcagccaatcagagcggcgcgctccgaaagtttccttttatggcgaggcggcggcggcggcggccctataaaaagcgaagcgcgcggcgggcggggagtcgctgcgacgctgccttcgccccgtgccccgctccgccgccgcctcgcgccgcccgccccggctctgactgaccgcgttactcccacaggtgagcgggcgggacggcccttctcctccgggctgtaattagcgcttggtttaatgacggcttgtttcttttctgtggctgcgtgaaagccttgaggggctccgggagggccctttgtgcggggggagcggctcggggggtgcgtgcgtgtgtgtgtgcgtggggagcgccgcgtgcggctccgcgctgcccggcggctgtgagcgctgcgggcgcggcgcggggctttgtgcgctccgcagtgtgcgcgaggggagcgcggccgggggcggtgccccgcggtgcggggggggctgcgaggggaacaaaggctgcgtgcggggtgtgtgcgtgggggggtgagcagggggtgtgggcgcgtcggtcgggctgcaaccccccctgcacccccctccccgagttgctgagcacggcccggcttcgggtgcggggctccgtacggggcgtggcgcggggctcgccgtgccgggcggggggtggcggcaggtgggggtgccgggcggggcggggccgcctcgggccggggagggctcgggggaggggcgcggcggcccccggagcgccggcggctgtcgaggcgcggcgagccgcagccattgccttttatggtaatcgtgcgagagggcgcagggacttcctttgtcccaaatctgtgcggagccgaaatctgggaggcgccgccgcaccccctctagcgggcgcggggcgaagcggtgcggcgccggcaggaaggaaatgggcggggagggccttcgtgcgtcgccgcgccgccgtccccttctccctctccagcctcggggctgtccgcggggggacggctgccttcgggggggacggggcagggcggggttcggcttctggcgtgtgaccggcggctctagagcctctgctaaccatgttcatgccttcttctttttcctacaggcacctgtgattgcctcgggagttgaaatacacccagattgccaccatgaccgagtacaagcccacggtgcgcctcgccacccgcgacgacgtccccagggccgtacgcaccctcgccgccgcgttcgccgactaccccgccacgcgccacaccgtcgatccggaccgccacatcgagcgggtcaccgagctgcaagaactcttcctcacgcgcgtcgggctcgacatcggcaaggtgtgggtcgcggacgacggcgccgcggtggcggtctggaccacgccggagagcgtcgaagcgggggcggtgttcgccgagatcggcccgcgcatggccgagttgagcggttcccggctggccgcgcagcaacagatggaaggcctcctggcgccgcaccggcccaaggagcccgcgtggttcctggccaccgtcggcgtctcgcccgaccaccagggcaagggtctgggcagcgccgtcgtgctccccggagtggaggcggccgagcgcgccggggtgcccgccttcctggagacctccgcgccccgcaacctccccttctacgagcggctcggcttcaccgtcaccgccgacgtcgaggtgcccgaaggaccgcgcacctggtgcatgacccgcaagcccggtgccggcggcgggtccggaggagagggcagaggaagtctcctaacatgcggtgacgtggaggagaatcctggcccaatgggagcccggtgccgcagcttttccgcgctcctgctcctgctgcaggtctcctcatggctttgccaggagctggagcctgagtcctgcagtcccggcttcagttccgaggtctacaccttcccggtgccggagaggcacctggagagaggccatgtcctgggcagagtgagatttgaaggatgcactggccggccaaggacagccttcttttcggaagactcccgattcaaagtggcgacagacggcaccatcacagtgaagcggcatctaaagctccacaagctggagaccagtttcctcgtccgcgcccgggactccagtcatagggagctgtctaccaaagtgacgctgaagtccatggggcaccaccatcaccggcaccaccaccgcgaccctgcctctgaatccaacccagagctgctcatgtttcccagcgtgtacccaggtctcagaagacagaaacgagactgggtcatccctcccatcagctgccccatggtgagcaagggcgaggagctgttcaccggggtggtgcccatcctggtcgagctggacggcgacgtaaacggccacaagttcagcgtgtccggcgagggcgagggcgatgccacctacggcaagctgaccctgaagttcatctgcaccaccggcaagctgcccgtgccctggcccaccctcgtgaccaccctgacctacggcgtgcagtgcttcagccgctaccccgaccacatgaagcagcacgacttcttcaagtccgccatgcccgaaggctacgtccaggagcgcaccatcttcttcaaggacgacggcaactacaagacccgcgccgaggtgaagttcgagggcgacaccctggtgaaccgcatcgagctgaagggcatcgacttcaaggaggacggcaacatcctggggcacaagctggagtacaactacaacagccacaacgtctatatcatggccgacaagcagaagaacggcatcaaggtgaacttcaagatccgccacaacatcgaggacggcagcgtgcagctcgccgaccactaccagcagaacacccccatcggcgacggccccgtgctgctgcccgacaaccactacctgagcacccagtccgccctgagcaaagaccccaacgagaagcgcgatcacatggtcctgctggagttcgtgaccgccgccgggatcactctcggcatggatgaactatacgaaaatgaaaagggtgaattcccaaagaacctggttcagatcaaatccaacagggacaaagaaacaaaggttttctacagcatcaccggccaaggagctgacaaaccccccgttggcgttttcatcattgagagggagacaggctggctgaaagtgacacagcctctggatagagaagccattgccaagtacatcctctattctcatgccgtgtcatcaaatggggaagcggtggaggatcccatggagatagtgatcacagtgacagatcagaatgacaacaggccagagtttacccaggaggtgtttgagggatccgttgcagaaggcgctgttccaggaacctccgtgatgaaggtctcagccaccgatgcagacgatgacgtcaacacctacaacgctgccatcgcctacaccatcgtcagccaggatcctgagctgcctcacaaaaacatgttcactgtcaatagggacaccggggtcatcagtgtgctcacctctgggctggaccgagagagttaccctacatacactctggtggttcaggctgctgaccttcaaggcgaaggcttgagcacaacagccaaggctgtgatcactgtcaaggatattaatgacaacgctcctgtcttcaacccgagcacgtatcagggtcaagtgcctgagaatgaggtcaatgcccggatcgccacactcaaagtgaccgatgatgatgcccccaacactccggcgtggaaagctgtgtacaccgtagtcaacgatcctgaccagcagttcgttgtcgtcacagaccccacgaccaatgatggcattttgaaaacagccaagggcttggattttgaggccaagcagcaatacatccttcatgtgagagtggagaacgaggaaccctttgaggggtctcttgtcccttccacagccactgtcactgtggacgtggtagacgtgaatgaagcccccatctttatgcctgcggagaggagagtcgaagtgcccgaagactttggtgtgggtcaggaaatcacatcttataccgctcgagagccggacacgttcatggatcagaagatcacgtatcggatttggagggacactgccaactggctggagattaacccagagactggtgccattttcacgcgcgctgagatggacagagaagacgctgagcatgtgaagaacagcacatatgtagctctcatcatcgccacagatgatggttcacccattgccactggcacgggcactcttctcctggtcctgttagacgtcaatgacaacgctcccatcccagaacctcgaaacatgcagttctgccagaggaacccacagcctcatatcatcaccatcttggatccagaccttccccccaacacgtccccctttactgctgagctaacccatggggccagcgtcaactggaccattgagtataatgacgcagctcaagaatctctcattttgcaaccaagaaaggacttagagattggcgaatacaaaatccatctcaagctcgcggataaccagaacaaagaccaggtgaccacgttggacgtccatgtgtgtgactgtgaagggacggtcaacaactgcatgaaggcgggaatcgtggcagcaggattgcaagttcctgccatcctcggaatccttggagggatcctcgccctgctgattctgatcctgctgctcctactgtttctacggaggagaacggtggtcaaagagcccctgctgccaccagatgatgatacccgggacaatgtgtattactatgatgaagaaggaggtggagaagaagaccaggactttgatttgagccagctgcacaggggcctggatgcccgaccggaagtgactcgaaatgatgtggctcccaccctcatgagcgtgccccagtatcgtccccgtcctgccaatcctgatgaaattggaaacttcatcgatgaaaacctgaaggcagccgacagcgaccccacggcacccccttacgactctctgttggtgttcgattacgagggcagtggttctgaagccgctagcctgagctcactgaactcctctgagtcggatcaggaccaggactacgattatctgaacgagtggggcaaccgattcaagaagctggcggacatgtacggcggtggcgaggacgacggcggcgggtccggaggagactataaggaccacgacggagactacaaggatcatgatattgattacaaagacgatgacgataagtagttaccaatagtcggcggttatcagcggaccctacgaagttgcggccgcgattaaaaaacctcccacacctccccctgaacctgaaacataaaatgaatgcaattgttgttgttaacttgtttattgcagcttataatggttacaaataaagcaatagcatcacaaatttcacaaataaagcatttttttcactgcattctagttgtggtttgtccaaactcatcaatgtatcttaaggaattcgataaaagttttgttactttatagaagaaattttgagtttttgtttttttttaataaataaataaacataaataaattgtttgttgaatttattattagtatgtaagtgtaaatataataaaacttaatatctattcaaattaataaataaacctcgatatacagaccgataaaacacatgcgtcaattttacgcatgattatctttaacgtacgtcacaatatgattatctttctagggttaatctagctgcggcgcgccggtacccaattcgccctatagtgagtcgtattacgcgcgctcactggccgtcgttttacaacgtcgtgactgggaaaaccctggcgttacccaacttaatcgccttgcagcacatccccctttcgccagctggcgtaatagcgaagaggcccgcaccgatcgcccttcccaacagttgcgcagcctgaatggcgaatgggacgcgccctgtagcggcgcattaagcgcggcgggtgtggtggttacgcgcagcgtgaccgctacacttgccagcgccctagcgcccgctcctttcgctttcttcccttcctttctcgccacgttcgccggctttccccgtcaagctctaaatcgggggctccctttagggttccgatttagtgctttacggcacctcgaccccaaaaaacttgattagggtgatggttcacgtagtgggccatcgccctgatagacggtttttcgccctttgacgttggagtccacgttctttaatagtggactcttgttccaaactggaacaacactcaaccctatctcggtctattcttttgatttataagggattttgccgatttcggcctattggttaaaaaatgagctgatttaacaaaaatttaacgcgaattttaacaaaatattaacgcttacaatttaggtggcacttttcggggaaatgtgcgcggaacccctatttgtttatttttctaaatacattcaaatatgtatccgctcatgagacaataaccctgataaatgcttcaataatattgaaaaaggaagagtatgagtattcaacatttccgtgtcgcccttattcccttttttgcggcattttgccttcctgtttttgctcacccagaaacgctggtgaaagtaaaagatgctgaagatcagttgggtgcacgagtgggttacatcgaactggatctcaacagcggtaagatccttgagagttttcgccccgaagaacgttttccaatgatgagcacttttaaagttctgctatgtggcgcggtattatcccgtattgacgccgggcaagagcaactcggtcgccgcatacactattctcagaatgacttggttgagtactcaccagtcacagaaaagcatcttacggatggcatgacagtaagagaattatgcagtgctgccataaccatgagtgataacactgcggccaacttacttctgacaacgatcggaggaccgaaggagctaaccgcttttttgcacaacatgggggatcatgtaactcgccttgatcgttgggaaccggagctgaatgaagccataccaaacgacgagcgtgacaccacgatgcctgtagcaatggcaacaacgttgcgcaaactattaactggcgaactacttactctagcttcccggcaacaattaatagactggatggaggcggataaagttgcaggaccacttctgcgctcggcccttccggctggctggtttattgctgataaatctggagccggtgagcgtgggtctcgcggtatcattgcagcactggggccagatggtaagccctcccgtatcgtagttatctacacgacggggagtcaggcaactatggatgaacgaaatagacagatcgctgagataggtgcctcactgattaagcattggtaactgtcagaccaagtttactcatatatactttagattgatttaaaacttcatttttaatttaaaaggatctaggtgaagatcctttttgataatctcatgaccaaaatcccttaacgtgagttttcgttccactgagcgtcagaccccgtagaaa

SEQ ID NO: 77 - DNA, 7653 bp, synthetic construct
  source 1..7653: mol_type = other DNA
agatcaaaggatcttcttgagatcctttttttctgcgcgtaatctgctgcttgcaaacaaaaaaaccaccgctaccagcggtggtttgtttgccggatcaagagctaccaactctttttccgaaggtaactggcttcagcagagcgcagataccaaatactgtccttctagtgtagccgtagttaggccaccacttcaagaactctgtagcaccgcctacatacctcgctctgctaatcctgttaccagtggctgctgccagtggcgataagtcgtgtcttaccgggttggactcaagacgatagttaccggataaggcgcagcggtcgggctgaacggggggttcgtgcacacagcccagcttggagcgaacgacctacaccgaactgagatacctacagcgtgagctatgagaaagcgccacgcttcccgaagggagaaaggcggacaggtatccggtaagcggcagggtcggaacaggagagcgcacgagggagcttccagggggaaacgcctggtatctttatagtcctgtcgggtttcgccacctctgacttgagcgtcgatttttgtgatgctcgtcaggggggcggagcctatggaaaaacgccagcaacgcggcctttttacggttcctggccttttgctggccttttgctcacatgttctttcctgcgttatcccctgattctgtggataaccgtattaccgcctttgagtgagctgataccgctcgccgcagccgaacgaccgagcgcagcgagtcagtgagcgaggaagcggaagagcgcccaatacgcaaaccgcctctccccgcgcgttggccgattcattaatgcagctggcacgacaggtttcccgactggaaagcgggcagtgagcgcaacgcaattaatgtgagttagctcactcattaggcaccccaggctttacactttatgcttccggctcgtatgttgtgtggaattgtgagcggataacaatttcacacaggaaacagctatgaccatgattacgccaagcgcgcaattaaccctcactaaagggaacaaaagctggagctccaccgcggggcgcgccgcagctagattaaccctagaaagatagtctgcgtaaaattgacgcatgcattcttgaaatattgctctctctttctaaatagcgcgaatccgtcgctgtgcatttaggacatctcagtcgccgcttggagctcccgtgaggcgtgcttgtcaatgcggtaagtgtcactgattttgaactataacaaccgcgtgagtcaaaatgacgcatgattatcttttacgtgacttttaagatttaactcatacgataattatattgttatttcgtgttctacttacgtgataacttattatatatatattttcttgttatagatgggaattcagacatgataagatacattgatgagtttggacaaaccacaactagaatgcagtgaaaaaaatgctttatttgtgaaatttgtgatgctattgctttatttgtaaccattataagctgcaataaacaagtttcgaggtcgagtgtcagtcctgctcctcggccacgaagtcgttacataacttacggtaaatggcccgcctggctgaccgcccaacgacccccgcccattgacgtcaataatgacgtatgttcccatagtaacgccaatagggactttccattgacgtcaatgggtggagtatttacggtaaactgcccacttggcagtacatcaagtgtatcatatgccaagtacgccccctattgacgtcaatgacggtaaatggcccgcctggcattatgcccagtacatgaccttatgggactttcctacttggcagtacatctacgtattagtcatcgctattaccatggtcgaggtgagccccacgttctgcttcactctccccatctcccccccctccccacccccaattttgtatttatttattttttaattattttgtgcagcgatgggggcggggggggggggggggcgcgcgccaggcggggcggggcggggcgaggggcggggcggggcgaggcggagaggtgcggcggcagccaatcagagcggcgcgctccgaaagtttccttttatggcgaggcggcggcggcggcggccctataaaaagcgaagcgcgcggcgggcggggagtcgctgcgacgctgccttcgccccgtgccccgctccgccgccgcctcgcgccgcccgccccggctctgactgaccgcgttactcccacaggtgagcgggcgggacggcccttctcctccgggctgtaattagcgcttggtttaatgacggcttgtttcttttctgtggctgcgtgaaagccttgaggggctccgggagggccctttgtgcggggggagcggctcggggggtgcgtgcgtgtgtgtgtgcgtggggagcgccgcgtgcggctccgcgctgcccggcggctgtgagcgctgcgggcgcggcgcggggctttgtgcgctccgcagtgtgcgcgaggggagcgcggccgggggcggtgccccgcggtgcggggggggctgcgaggggaacaaaggctgcgtgcggggtgtgtgcgtgggggggtgagcagggggtgtgggcgcgtcggtcgggctgcaaccccccctgcacccccctccccgagttgctgagcacggcccggcttcgggtgcggggctccgtacggggcgtggcgcggggctcgccgtgccgggcggggggtggcggcaggtgggggtgccgggcggggcggggccgcctcgggccggggagggctcgggggaggggcgcggcggcccccggagcgccggcggctgtcgaggcgcggcgagccgcagccattgccttttatggtaatcgtgcgagagggcgcagggacttcctttgtcccaaatctgtgcggagccgaaatctgggaggcgccgccgcaccccctctagcgggcgcggggcgaagcggtgcggcgccggcaggaaggaaatgggcggggagggccttcgtgcgtcgccgcgccgccgtccccttctccctctccagcctcggggctgtccgcggggggacggctgccttcgggggggacggggcagggcggggttcggcttctggcgtgtgaccggcggctctagagcctctgctaaccatgttcatgccttcttctttttcctacaggcacctgtgattgcctcgggagttgaaatacacccagattgaattcgatgccaccatgaccgagtacaagcccacggtgcgcctcgccacccgcgacgacgtccccagggccgtacgcaccctcgccgccgcgttcgccgactaccccgccacgcgccacaccgtcgatccggaccgccacatcgagcgggtcaccgagctgcaagaactcttcctcacgcgcgtcgggctcgacatcggcaaggtgtgggtcgcggacgacggcgccgcggtggcggtctggaccacgccggagagcgtcgaagcgggggcggtgttcgccgagatcggcccgcgcatggccgagttgagcggttcccggctggccgcgcagcaacagatggaaggcctcctggcgccgcaccggcccaaggagcccgcgtggttcctggccaccgtcggcgtctcgcccgaccaccagggcaagggtctgggcagcgccgtcgtgctccccggagtggaggcggccgagcgcgccggggtgcccgccttcctggagacctccgcgccccgcaacctccccttctacgagcggctcggcttcaccgtcaccgccgacgtcgaggtgcccgaaggaccgcgcacctggtgcatgacccgcaagcccggtgccggcggcgggtccggaggagagggcagaggaagtctcctaacatgcggtgacgtggaggagaatcctggcccaatggcctcaccgttgacccgctttctgtcgctgaacctgctgctgctgggtgagtcgattatcctggggagtggagaagctactagtatggtgagcaagggcgaggagctgttcaccggggtggtgcccatcctggtcgagctggacggcgacgtaaacggccacaagttcagcgtgtccggcgagggcgagggcgatgccacctacggcaagctgaccctgaagttcatctgcaccaccggcaagctgcccgtgccctggcccaccctcgtgaccaccctgacctacggcgtgcagtgcttcagccgctaccccgaccacatgaagcagcacgacttcttcaagtccgccatgcccgaaggctacgtccaggagcgcaccatcttcttcaaggacgacggcaactacaagacccgcgccgaggtgaagttcgagggcgacaccctggtgaaccgcatcgagctgaagggcatcgacttcaaggaggacggcaacatcctggggcacaagctggagtacaactacaacagccacaacgtctatatcatggccgacaagcagaagaacggcatcaaggtgaacttcaagatccgccacaacatcgaggacggcagcgtgcagctcgccgaccactaccagcagaacacccccatcggcgacggccccgtgctgctgcccgacaaccactacctgagcacccagtccgccctgagcaaagaccccaacgagaagcgcgatcacatggtcctgctggagttcgtgaccgccgccgggatcactctcggcatggatgaactatacaaggtggcagcaggattgcaagttcctgccatcctcggaatccttggagggatcctcgccctgctgattctgatcctgctgctcctactgtttctacggaggagaacggtggtcaaagagcccctgctgccaccagatgatgatacccgggacaatgtgtattactatgatgaagaaggaggtggagaagaagaccaggactttgatttgagccagctgcacaggggcctggatgcccgaccggaagtgactcgaaatgatgtggctcccaccctcatgagcgtgccccagtatcgtccccgtcctgccaatcctgatgaaattggaaacttcatcgatgaaaacctgaaggcagccgacagcgaccccacggcacccccttacgactctctgttggtgttcgattacgagggcagtggttctgaagccgctagcctgagctcactgaactcctctgagtcggatcaggaccaggactacgattatctgaacgagtggggcaaccgattcaagaagctggcggacatgtacggcggtggcgaggacgacggcggcgggtccggaggagactataaggaccacgacggagactacaaggatcatgatattgattacaaagacgatgacgataagtagatcaagcttttaccaatagtcggcggttatcagcggaccctacgaagttgcggccgcgattaaaaaacctcccacacctccccctgaacctgaaacataaaatgaatgcaattgttgttgttaacttgtttattgcagcttataatggttacaaataaagcaatagcatcacaaatttcacaaataaagcatttttttcactgcattctagttgtggtttgtccaaactcatcaatgtatcttaaggaattcgataaaagttttgttactttatagaagaaattttgagtttttgtttttttttaataaataaataaacataaataaattgtttgttgaatttattattagtatgtaagtgtaaatataataaaacttaatatctattcaaattaataaataaacctcgatatacagaccgataaaacacatgcgtcaattttacgcatgattatctttaacgtacgtcacaatatgattatctttctagggttaatctagctgcggcgcgccggtacccaattcgccctatagtgagtcgtattacgcgcgctcactggccgtcgttttacaacgtcgtgactgggaaaaccctggcgttacccaacttaatcgccttgcagcacatccccctttcgccagctggcgtaatagcgaagaggcccgcaccgatcgcccttcccaacagttgcgcagcctgaatggcgaatgggacgcgccctgtagcggcgcattaagcgcggcgggtgtggtggttacgcgcagcgtgaccgctacacttgccagcgccctagcgcccgctcctttcgctttcttcccttcctttctcgccacgttcgccggctttccccgtcaagctctaaatcgggggctccctttagggttccgatttagtgctttacggcacctcgaccccaaaaaacttgattagggtgatggttcacgtagtgggccatcgccctgatagacggtttttcgccctttgacgttggagtccacgttctttaatagtggactcttgttccaaactggaacaacactcaaccctatctcggtctattcttttgatttataagggattttgccgatttcggcctattggttaaaaaatgagctgatttaacaaaaatttaacgcgaattttaacaaaatattaacgcttacaatttaggtggcacttttcggggaaatgtgcgcggaacccctatttgtttatttttctaaatacattcaaatatgtatccgctcatgagacaataaccctgataaatgcttcaataatattgaaaaaggaagagtatgagtattcaacatttccgtgtcgcccttattcccttttttgcggcattttgccttcctgtttttgctcacccagaaacgctggtgaaagtaaaagatgctgaagatcagttgggtgcacgagtgggttacatcgaactggatctcaacagcggtaagatccttgagagttttcgccccgaagaacgttttccaatgatgagcacttttaaagttctgctatgtggcgcggtattatcccgtattgacgccgggcaagagcaactcggtcgccgcatacactattctcagaatgacttggttgagtactcaccagtcacagaaaagcatcttacggatggcatgacagtaagagaattatgcagtgctgccataaccatgagtgataacactgcggccaacttacttctgacaacgatcggaggaccgaaggagctaaccgcttttttgcacaacatgggggatcatgtaactcgccttgatcgttgggaaccggagctgaatgaagccataccaaacgacgagcgtgacaccacgatgcctgtagcaatggcaacaacgttgcgcaaactattaactggcgaactacttactctagcttcccggcaacaattaatagactggatggaggcggataaagttgcaggaccacttctgcgctcggcccttccggctggctggtttattgctgataaatctggagccggtgagcgtgggtctcgcggtatcattgcagcactggggccagatggtaagccctcccgtatcgtagttatctacacgacggggagtcaggcaactatggatgaacgaaatagacagatcgctgagataggtgcctcactgattaagcattggtaactgtcagaccaagtttactcatatatactttagattgatttaaaacttcatttttaatttaaaaggatctaggtgaagatcctttttgataatctcatgaccaaaatcccttaacgtgagttttcgttccactgagcgtcagaccccgtagaaa

SEQ ID NO: 78 - DNA, 8001 bp, synthetic construct
  source 1..8001: mol_type = other DNA
agatcaaaggatcttcttgagatcctttttttctgcgcgtaatctgctgcttgcaaacaaaaaaaccaccgctaccagcggtggtttgtttgccggatcaagagctaccaactctttttccgaaggtaactggcttcagcagagcgcagataccaaatactgtccttctagtgtagccgtagttaggccaccacttcaagaactctgtagcaccgcctacatacctcgctctgctaatcctgttaccagtggctgctgccagtggcgataagtcgtgtcttaccgggttggactcaagacgatagttaccggataaggcgcagcggtcgggctgaacggggggttcgtgcacacagcccagcttggagcgaacgacctacaccgaactgagatacctacagcgtgagctatgagaaagcgccacgcttcccgaagggagaaaggcggacaggtatccggtaagcggcagggtcggaacaggagagcgcacgagggagcttccagggggaaacgcctggtatctttatagtcctgtcgggtttcgccacctctgacttgagcgtcgatttttgtgatgctcgtcaggggggcggagcctatggaaaaacgccagcaacgcggcctttttacggttcctggccttttgctggccttttgctcacatgttctttcctgcgttatcccctgattctgtggataaccgtattaccgcctttgagtgagctgataccgctcgccgcagccgaacgaccgagcgcagcgagtcagtgagcgaggaagcggaagagcgcccaatacgcaaaccgcctctccccgcgcgttggccgattcattaatgcagctggcacgacaggtttcccgactggaaagcgggcagtgagcgcaacgcaattaatgtgagttagctcactcattaggcaccccaggctttacactttatgcttccggctcgtatgttgtgtggaattgtgagcggataacaatttcacacaggaaacagctatgaccatgattacgccaagcgcgcaattaaccctcactaaagggaacaaaagctggagctccaccgcggggcgcgccgcagctagattaaccctagaaagatagtctgcgtaaaattgacgcatgcattcttgaaatattgctctctctttctaaatagcgcgaatccgtcgctgtgcatttaggacatctcagtcgccgcttggagctcccgtgaggcgtgcttgtcaatgcggtaagtgtcactgattttgaactataacaaccgcgtgagtcaaaatgacgcatgattatcttttacgtgacttttaagatttaactcatacgataattatattgttatttcgtgttctacttacgtgataacttattatatatatattttcttgttatagatgggaattcagacatgataagatacattgatgagtttggacaaaccacaactagaatgcagtgaaaaaaatgctttatttgtgaaatttgtgatgctattgctttatttgtaaccattataagctgcaataaacaagtttcgaggtcgagtgtcagtcctgctcctcggccacgaagtcgttacataacttacggtaaatggcccgcctggctgaccgcccaacgacccccgcccattgacgtcaataatgacgtatgttcccatagtaacgccaatagggactttccattgacgtcaatgggtggagtatttacggtaaactgcccacttggcagtacatcaagtgtatcatatgccaagtacgccccctattgacgtcaatgacggtaaatggcccgcctggcattatgcccagtacatgaccttatgggactttcctacttggcagtacatctacgtattagtcatcgctattaccatggtcgaggtgagccccacgttctgcttcactctccccatctcccccccctccccacccccaattttgtatttatttattttttaattattttgtgcagcgatgggggcggggggggggggggggcgcgcgccaggcggggcggggcggggcgaggggcggggcggggcgaggcggagaggtgcggcggcagccaatcagagcggcgcgctccgaaagtttccttttatggcgaggcggcggcggcggcggccctataaaaagcgaagcgcgcggcgggcggggagtcgctgcgacgctgccttcgccccgtgccccgctccgccgccgcctcgcgccgcccgccccggctctgactgaccgcgttactcccacaggtgagcgggcgggacggcccttctcctccgggctgtaattagcgcttggtttaatgacggcttgtttcttttctgtggctgcgtgaaagccttgaggggctccgggagggccctttgtgcggggggagcggctcggggggtgcgtgcgtgtgtgtgtgcgtggggagcgccgcgtgcggctccgcgctgcccggcggctgtgagcgctgcgggcgcggcgcggggctttgtgcgctccgcagtgtgcgcgaggggagcgcggccgggggcggtgccccgcggtgcggggggggctgcgaggggaacaaaggctgcgtgcggggtgtgtgcgtgggggggtgagcagggggtgtgggcgcgtcggtcgggctgcaaccccccctgcacccccctccccgagttgctgagcacggcccggcttcgggtgcggggctccgtacggggcgtggcgcggggctcgccgtgccgggcggggggtggcggcaggtgggggtgccgggcggggcggggccgcctcgggccggggagggctcgggggaggggcgcggcggcccccggagcgccggcggctgtcgaggcgcggcgagccgcagccattgccttttatggtaatcgtgcgagagggcgcagggacttcctttgtcccaaatctgtgcggagccgaaatctgggaggcgccgccgcaccccctctagcgggcgcggggcgaagcggtgcggcgccggcaggaaggaaatgggcggggagggccttcgtgcgtcgccgcgccgccgtccccttctccctctccagcctcggggctgtccgcggggggacggctgccttcgggggggacggggcagggcggggttcggcttctggcgtgtgaccggcggctctagagcctctgctaaccatgttcatgccttcttctttttcctacaggcacctgtgattgcctcgggagttgaaatacacccagattgaattcgatgccaccatgaccgagtacaagcccacggtgcgcctcgccacccgcgacgacgtccccagggccgtacgcaccctcgccgccgcgttcgccgactaccccgccacgcgccacaccgtcgatccggaccgccacatcgagcgggtcaccgagctgcaagaactcttcctcacgcgcgtcgggctcgacatcggcaaggtgtgggtcgcggacgacggcgccgcggtggcggtctggaccacgccggagagcgtcgaagcgggggcggtgttcgccgagatcggcccgcgcatggccgagttgagcggttcccggctggccgcgcagcaacagatggaaggcctcctggcgccgcaccggcccaaggagcccgcgtggttcctggccaccgtcggcgtctcgcccgaccaccagggcaagggtctgggcagcgccgtcgtgctccccggagtggaggcggccgagcgcgccggggtgcccgccttcctggagacctccgcgccccgcaacctccccttctacgagcggctcggcttcaccgtcaccgccgacgtcgaggtgcccgaaggaccgcgcacctggtgcatgacccgcaagcccggtgccggcggcgggtccggaggagagggcagaggaagtctcctaacatgcggtgacgtggaggagaatcctggcccaatggcctcaccgttgacccgctttctgtcgctgaacctgctgctgctgggtgagtcgattatcctggggagtggagaagctactagtatggtgagcaagggcgaggaggataacatggccatcatcaaggagttcatgcgcttcaaggtgcacatggagggctccgtgaacggccacgagttcgagatcgagggcgagggcgagggccgcccctacgagggcacccagaccgccaagctgaaggtgaccaagggtggccccctgcccttcgcctgggacatcctgtcccctcagttcatgtacggctccaaggcctacgtgaagcaccccgccgacatccccgactacttgaagctgtccttccccgagggcttcaagtgggagcgcgtgatgaacttcgaggacggcggcgtggtgaccgtgacccaggactcctccctgcaggacggcgagttcatctacaaggtgaagctgcgcggcaccaacttcccctccgacggccccgtaatgcagaagaagaccatgggctgggaggcctcctccgagcggatgtaccccgaggacggcgccctgaagggcgagatcaagcagaggctgaagctgaaggacggcggccactacgacgctgaggtcaagaccacctacaaggccaagaagcccgtgcagctgcccggcgcctacaacgtcaacatcaagttggacatcacctcccacaacgaggactacaccatcgtggaacagtacgaacgcgccgagggccgccactccaccggcggcatggacgagctgtacaagcaggttcaactggtggaaagcggcggtgctctggtacaaccgggcggtagtctgcgcctgagctgtgccgcaagcggtttcccagtcaaccgctactctatgcgttggtatcgccaggcgcctggtaaagaacgtgaatgggttgccggcatgagcagtgcgggcgatcgttctagttacgaggactctgttaaaggtcgttttacaattagccgtgatgatgcgcgcaataccgtgtatctgcaaatgaacagtctgaagccggaggacaccgcagtatattattgcaatgtcaacgtggggtttgaatattggggccaggggactcaggtgacggtgagctctcaactcgagaatgtggcagcaggattgcaagttcctgccatcctcggaatccttggagggatcctcgccctgctgattctgatcctgctgctcctactgtttctacggaggagaacggtggtcaaagagcccctgctgccaccagatgatgatacccgggacaatgtgtattactatgatgaagaaggaggtggagaagaagaccaggactttgatttgagccagctgcacaggggcctggatgcccgaccggaagtgactcgaaatgatgtggctcccaccctcatgagcgtgccccagtatcgtccccgtcctgccaatcctgatgaaattggaaacttcatcgatgaaaacctgaaggcagccgacagcgaccccacggcacccccttacgactctctgttggtgttcgattacgagggcagtggttctgaagccgctagcctgagctcactgaactcctctgagtcggatcaggaccaggactacgattatctgaacgagtggggcaaccgattcaagaagctggcggacatgtacggcggtggcgaggacgacggcggcgggtccggaggagactataaggaccacgacggagactacaaggatcatgatattgattacaaagacgatgacgataagtagatcaagcttttaccaatagtcggcggttatcagcggaccctacgaagttgcggccgcgattaaaaaacctcccacacctccccctgaacctgaaacataaaatgaatgcaattgttgttgttaacttgtttattgcagcttataatggttacaaataaagcaatagcatcacaaatttcacaaataaagcatttttttcactgcattctagttgtggtttgtccaaactcatcaatgtatcttaaggaattcgataaaagttttgttactttatagaagaaattttgagtttttgtttttttttaataaataaataaacataaataaattgtttgttgaatttattattagtatgtaagtgtaaatataataaaacttaatatctattcaaattaataaataaacctcgatatacagaccgataaaacacatgcgtcaattttacgcatgattatctttaacgtacgtcacaatatgattatctttctagggttaatctagctgcggcgcgccggtacccaattcgccctatagtgagtcgtattacgcgcgctcactggccgtcgttttacaacgtcgtgactgggaaaaccctggcgttacccaacttaatcgccttgcagcacatccccctttcgccagctggcgtaatagcgaagaggcccgcaccgatcgcccttcccaacagttgcgcagcctgaatggcgaatgggacgcgccctgtagcggcgcattaagcgcggcgggtgtggtggttacgcgcagcgtgaccgctacacttgccagcgccctagcgcccgctcctttcgctttcttcccttcctttctcgccacgttcgccggctttccccgtcaagctctaaatcgggggctccctttagggttccgatttagtgctttacggcacctcgaccccaaaaaacttgattagggtgatggttcacgtagtgggccatcgccctgatagacggtttttcgccctttgacgttggagtccacgttctttaatagtggactcttgttccaaactggaacaacactcaaccctatctcggtctattcttttgatttataagggattttgccgatttcggcctattggttaaaaaatgagctgatttaacaaaaatttaacgcgaattttaacaaaatattaacgcttacaatttaggtggcacttttcggggaaatgtgcgcggaacccctatttgtttatttttctaaatacattcaaatatgtatccgctcatgagacaataaccctgataaatgcttcaataatattgaaaaaggaagagtatgagtattcaacatttccgtgtcgcccttattcccttttttgcggcattttgccttcctgtttttgctcacccagaaacgctggtgaaagtaaaagatgctgaagatcagttgggtgcacgagtgggttacatcgaactggatctcaacagcggtaagatccttgagagttttcgccccgaagaacgttttccaatgatgagcacttttaaagttctgctatgtggcgcggtattatcccgtattgacgccgggcaagagcaactcggtcgccgcatacactattctcagaatgacttggttgagtactcaccagtcacagaaaagcatcttacggatggcatgacagtaagagaattatgcagtgctgccataaccatgagtgataacactgcggccaacttacttctgacaacgatcggaggaccgaaggagctaaccgcttttttgcacaacatgggggatcatgtaactcgccttgatcgttgggaaccggagctgaatgaagccataccaaacgacgagcgtgacaccacgatgcctgtagcaatggcaacaacgttgcgcaaactattaactggcgaactacttactctagcttcccggcaacaattaatagactggatggaggcggataaagttgcaggaccacttctgcgctcggcccttccggctggctggtttattgctgataaatctggagccggtgagcgtgggtctcgcggtatcattgcagcactggggccagatggtaagccctcccgtatcgtagttatctacacgacggggagtcaggcaactatggatgaacgaaatagacagatcgctgagataggtgcctcactgattaagcattggtaactgtcagaccaagtttactcatatatactttagattgatttaaaacttcatttttaatttaaaaggatctaggtgaagatcctttttgataatctcatgaccaaaatcccttaacgtgagttttcgttccactgagcgtcagaccccgtagaaa

SEQ ID NO: 79 - DNA, 8076 bp, synthetic construct
  source 1..8076: mol_type = other DNA
gttgtttaccctcacaacgttccagtaaccgggcatgttcatcatcagtaacccgtatcgtgagcatcctctctcgtttcatcggtatcattacccccatgaacagaaatcccccttacacggaggcatcagtgaccaaacaggaaaaaaccgcccttaacatggcccgctttatcagaagccagacattaacgcttctggagaaactcaacgagctggacgcggatgaacaggcagacatctgtgaatcgcttcacgaccacgctgatgagctttaccgcagctgcctcgcgcgtttcggtgatgacggtgaaaacctctgacacatgcagctcccggagacggtcacagcttgtctgtaagcggatgccgggagcagacaagcccgtcagggcgcgtcagcgggtgttggcgggtgtcggggcgcagccatgacccagtcacgtagcgatagcggagtgtatactggcttaactatgcggcatcagagcagattgtactgagagtgcaccatatgcggtgtgaaataccgcacagatgcgtaaggagaaaataccgcatcaggcgctcttccgcttcctcgctcactgactcgctgcgctcggtcgttcggctgcggcgagcggtatcagctcactcaaaggcggtaatacggttatccacagaatcaggggataacgcaggaaagaacatgtgagcaaaaggccagcaaaaggccaggaaccgtaaaaaggccgcgttgctggcgtttttccataggctccgcccccctgacgagcatcacaaaaatcgacgctcaagtcagaggtggcgaaacccgacaggactataaagataccaggcgtttccccctggaagctccctcgtgcgctctcctgttccgaccctgccgcttaccggatacctgtccgcctttctcccttcgggaagcgtggcgctttctcatagctcacgctgtaggtatctcagttcggtgtaggtcgttcgctccaagctgggctgtgtgcacgaaccccccgttcagcccgaccgctgcgccttatccggtaactatcgtcttgagtccaacccggtaagacacgacttatcgccactggcagcagccactggtaacaggattagcagagcgaggtatgtaggcggtgctacagagttcttgaagtggtggcctaactacggctacactagaaggacagtatttggtatctgcgctctgctgaagccagttaccttcggaaaaagagttggtagctcttgatccggcaaacaaaccaccgctggtagcggtggtttttttgtttgcaagcagcagattacgcgcagaaaaaaaggatctcaagaagatcctttgatcttttctacggggtctgacgctcagtggaacgaaaactcacgttaagggattttggtcatgagattatcaaaaaggatcttcacctagatccttttaaattaaaaatgaagttttaaatcaagttgcgactgtagagcgttgaccctgacacaatacttacgattaccctgttatccctacgctaccttcggtgaaagtgagtcggcacaatctcgtaatgtgaacactgcttcgccacttattgatagtcgcaacgggagcgatcgctaaaagcagcgattcgtggctcagtcccagagtcgtatctagctagtcaggtagtaaaaggtctcaactaggcagtggcagagcaggattcaaattcagggctgttgtgatgcctccgcagactctgagcgccacctggtggtaatttgtctgtgcctcttctgacgtggaagaacagcaactaacacactaacacggcatttactatgggccagccattgttctaaagccctcgttcacagagaaagttcggttacactgcggatttcgacattgattattgactagttattaatagtaatcaattacggggtcattagttcatagcccatatatggagttccgcgttacataacttacggtaaatggcccgcctggctgaccgcccaacgacccccgcccattgacgtcaataatgacgtatgttcccatagtaacgccaatagggactttccattgacgtcaatgggtggactatttacggtaaactgcccacttggcagtacatcaagtgtatcatatgccaagtacgccccctattgacgtcaatgacggtaaatggcccgcctggcattatgcccagtacatgaccttatgggactttcctacttggcagtacatctacgtattagtcatcgctattaccatgggtcgaggtgagccccacgttctgcttcactctccccatctcccccccctccccacccccaattttgtatttatttattttttaattattttgtgcagcgatgggggcggggggggggggggcgcgcgccaggcggggcggggcggggcgaggggcggggcggggcgaggcggagaggtgcggcggcagccaatcagagcggcgcgctccgaaagtttccttttatggcgaggcggcggcggcggcggccctataaaaagcgaagcgcgcggcgggcgggagtcgctgcgttgccttcgccccgtgccccgctccgcgccgcctcgcgccgcccgccccggctctgactgaccgcgttactcccacaggtgagcgggcgggacggcccttctcctccgggctgtaattagcgcttggtttaatgacggctcgtttcttttctgtggctgcgtgaaagccttaaagggctccgggagggccctttgtgcgggggggagcggctcggggggtgcgtgcgtgtgtgtgtgcgtggggagcgccgcgtgcggcccgcgctgcccggcggctgtgagcgctgcgggcgcggcgcggggctttgtgcgctccgcgtgtgcgcgaggggagcgcggccgggggcggtgccccgcggtgcgggggggctgcgaggggaacaaaggctgcgtgcggggtgtgtgcgtgggggggtgagcagggggtgtgggcgcggcggtcgggctgtaacccccccctgcacccccctccccgagttgctgagcacggcccggcttcgggtgcggggctccgtgcggggcgtggcgcggggctcgccgtgccgggcggggggtggcggcaggtgggggtgccgggcggggcggggccgcctcgggccggggagggctcgggggaggggcgcggcggccccggagcgccggcggctgtcgaggcgcggcgagccgcagccattgccttttatggtaatcgtgcgagagggcgcagggacttcctttgtcccaaatctggcggagccgaaatctgggaggcgccgccgcaccccctctagcgggcgcgggcgaagcggtgcggcgccggcaggaaggaaatgggcggggagggccttcgtgcgtcgccgcgccgccgtccccttctccatctccagcctcggggctgccgcagggggacggctgccttcgggggggacggggcagggcggggttcggcttctggcgtgtgaccggcggctctagagcctctgctaaccatgttcatgccttcttctttttcctacagctcctgggcaacgtgctggttattgtgctgtctcatcattttggcaaaggcacctgtgattgcctcgggagttgaaatacacccagattgccaccatgaccgagtacaagcccacggtgcgcctcgccacccgcgacgacgtccccagggccgtacgcaccctcgccgccgcgttcgccgactaccccgccacgcgccacaccgtcgatccggaccgccacatcgagcgggtcaccgagctgcaagaactcttcctcacgcgcgtcgggctcgacatcggcaaggtgtgggtcgcggacgacggcgccgcggtggcggtctggaccacgccggagagcgtcgaagcgggggcggtgttcgccgagatcggcccgcgcatggccgagttgagcggttcccggctggccgcgcagcaacagatggaaggcctcctggcgccgcaccggcccaaggagcccgcgtggttcctggccaccgtcggcgtctcgcccgaccaccagggcaagggtctgggcagcgccgtcgtgctccccggagtggaggcggccgagcgcgccggggtgcccgccttcctggagacctccgcgccccgcaacctccccttctacgagcggctcggcttcaccgtcaccgccgacgtcgaggtgcccgaaggaccgcgcacctggtgcatgacccgcaagcccggtgccggcggcgggtccggaggagagggcagaggaagtctcctaacatgcggtgacgtggaggagaatcctggcccaatggcctctactggtctgcaaatcttggggatcgtcctgaccctgcttggctgggtcaacgccctggtgtcctgtgccctgcccatgtggaaggtgaccgccttcatcggcaacatggtgagcaagggcgaggagctgttcaccggggtggtgcccatcctggtcgagctggacggcgacgtaaacggccacaagttcagcgtgtccggcgagggcgagggcgatgccacctacggcaagctgaccctgaagttcatctgcaccaccggcaagctgcccgtgccctggcccaccctcgtgaccaccctgacctacggcgtgcagtgcttcagccgctaccccgaccacatgaagcagcacgacttcttcaagtccgccatgcccgaaggctacgtccaggagcgcaccatcttcttcaaggacgacggcaactacaagacccgcgccgaggtgaagttcgagggcgacaccctggtgaaccgcatcgagctgaagggcatcgacttcaaggaggacggcaacatcctggggcacaagctggagtacaactacaacagccacaacgtctatatcatggccgacaagcagaagaacggcatcaaggtgaacttcaagatccgccacaacatcgaggacggcagcgtgcagctcgccgaccactaccagcagaacacccccatcggcgacggccccgtgctgctgcccgacaaccactacctgagcacccagtccgccctgagcaaagaccccaacgagaagcgcgatcacatggtcctgctggagttcgtgaccgccgccgggatcactctcggcatggatgaactatacgcgctgccccaggacctgcaggctgccagagccctctgtgttgtcaccctcctcattgtcctgcttggcctgctcgtgtacctggctggagccaagtgcactacctgtgtggaagataggaactccaagtctcgtctggtgctcatctctggcatcatctttgtcatttctggggtcctgacgctcattcctgtctgctggactgcccactctatcatccaggacttctacaaccccttggtggctgatgctcaaaagcgggagctgggggcctccctctacctgggctgggcagcctcaggccttttgctgctgggtggagggctactatgctgcgcctgctcttctggagggacccagggacccagacattacatggcctgctattctacatctgtcccacattctcggggaccctccgaatatcccaccaagaattatgtgtgattaccaatagtcggcggttatcagcggaccctacgaagttggagtaacgaccttgaagacgagtacagagttccggtttgaatcaacctctggattacaaaatttgtgaaagattgactggtattcttaactatgttgctccttttacgctatgtggatacgctgctttaatgcctttgtatcatgctattgcttcccgtatggctttcattttctcctccttgtataaatcctggttgctgtctctttatgaggagttgtggcccgttgtcaggcaacgtggcgtggtgtgcactgtgtttgctgacgcaacccccactggttggggcattgccaccacctgtcagctcctttccgggactttcgctttccccctccctattgccacggcggaactcatcgccgcctgccttgcccgctgctggacaggggctcggctgttgggcactgacaattccgtggtgttgtcctcgagtctagagggcccgtttaaacccgctgatcagcctcgactgtgccttctagttgccagccatctgttgtttgcccctcccccgtgccttccttgaccctggaaggtgccactcccactgtcctttcctaataaaatgaggaaattgcatcgcattgtctgagtaggtgtcattctattctggggggtggggtggggcaggacagcaagggggaggattgggaagacaatagcaggcatgctggggatgcggtgggctctatggctatgagttcgttccctccttgcctcctggtggtagatagttctccaaccgaagtgtttacggaagatagagcccgctgttagccctgagtctgcgttgtaagagcaataggtccactacgcgatcgcgcttttaccacgaacgataataggttggcgggtcactccaaaaagggtcgtgcggcgatactacaatctcctgttactcgtagggataacagggtaatcctgaaaagtggataaccagcaccgttgtgagtgtctcctagacgtcaggtggcacttttcggggaaatgtgcgcggaacccctatttgtttatttttctaaatacattcaaatatgtatccgctcatgagacaataaccctgataaatgcttcaataatattgaaaaaggaagagtatgagtattcaacatttccgtgtcgcccttattcccttttttgcggcattttgccttcctgtttttgctcacccagaaacgctggtgaaagtaaaagatgctgaagatcagttgggtgcacgagtgggttacatcgaactggatctcaacagcggtaagatccttgagagttttcgccccgaagaacgttttccaatgatgagcacttttaaagttctgctatgtggcgcggtattatcccgtgttgacgccgggcaagagcaactcggtcgccgcatacactattctcagaatgacttggttgagtactcaccagtcacagaaaagcatcttacggatggcatgacagtaagagaattatgcagtgctgccataaccatgagtgataacactgcggccaacttacttctgacaacgatcggaggaccgaaggagctaaccgcttttttgcacaacatgggggatcatgtaactcgccttgatcgttgggaaccggagctgaatgaagccataccaaacgacgagcgtgacaccacgatgcctgcagcaatggcaacaacgttgcgcaaactattaactggcgaactacttactctagcttcccggcaacaattaatagactggatggaggcggataaagttgcaggaccacttctgcgctcggcccttccggctggctggtttattgctgataaatctggagccggtgagcgtgggtctcgcggtatcattgcagcactggggccagatggtaagccctcccgtatcgtagttatctacacgacggggagtcaggcaactatggatgaacgaaatagacagatcgctgagataggtgcctcactgattaagcattggtaactgtcagaccaagtttactcatatatactttagacgcagtccctgtcctgagtagtaaacttccgaatagagtgattctgacaccgtgagtaagcacaggtcgggtcttcaatcatcgtctacggattgggacaccgaggtttctgaactcaacatgatcgtgctcctgtcgttgaggacccggctaggctggcggggttgccttactggttagcagaatgaatcaccgatacgcgagcgaacgtgaagcgactgctgctgcaaaacgtctgcgacctgagcaacaacatgaatggtcttcggtttccgtgtttcgtaaagtctggaaacgcggaagtcagcgccctgcaccattatgttccggatctgcatcgcaggatgctgctggctaccctgtggaacacctacatctgtattaacgaagcgctggcattgaccctgagtgatttttctctggtcccgccgcatccataccgcca

SEQ ID NO: 80 - DNA, 8121 bp, synthetic construct
  source 1..8121: mol_type = other DNA
ctggcgaactacttactctagcttcccggcaacaattaatagactggatggaggcggataaagttgcaggaccacttctgcgctcggcccttccggctggctggtttattgctgataaatctggagccggtgagcgtgggtctcgcggtatcattgcagcactggggccagatggtaagccctcccgtatcgtagttatctacacgacggggagtcaggcaactatggatgaacgaaatagacagatcgctgagataggtgcctcactgattaagcattggtaactgtcagaccaagtttactcatatatactttagacgcagtccctgtcctgagtagtaaacttccgaatagagtgattctgacaccgtgagtaagcacaggtcgggtcttcaatcatcgtctacggattgggacaccgaggtttctgaactcaacatgatcgtgctcctgtcgttgaggacccggctaggctggcggggttgccttactggttagcagaatgaatcaccgatacgcgagcgaacgtgaagcgactgctgctgcaaaacgtctgcgacctgagcaacaacatgaatggtcttcggtttccgtgtttcgtaaagtctggaaacgcggaagtcagcgccctgcaccattatgttccggatctgcatcgcaggatgctgctggctaccctgtggaacacctacatctgtattaacgaagcgctggcattgaccctgagtgatttttctctggtcccgccgcatccataccgccagttgtttaccctcacaacgttccagtaaccgggcatgttcatcatcagtaacccgtatcgtgagcatcctctctcgtttcatcggtatcattacccccatgaacagaaatcccccttacacggaggcatcagtgaccaaacaggaaaaaaccgcccttaacatggcccgctttatcagaagccagacattaacgcttctggagaaactcaacgagctggacgcggatgaacaggcagacatctgtgaatcgcttcacgaccacgctgatgagctttaccgcagctgcctcgcgcgtttcggtgatgacggtgaaaacctctgacacatgcagctcccggagacggtcacagcttgtctgtaagcggatgccgggagcagacaagcccgtcagggcgcgtcagcgggtgttggcgggtgtcggggcgcagccatgacccagtcacgtagcgatagcggagtgtatactggcttaactatgcggcatcagagcagattgtactgagagtgcaccatatgcggtgtgaaataccgcacagatgcgtaaggagaaaataccgcatcaggcgctcttccgcttcctcgctcactgactcgctgcgctcggtcgttcggctgcggcgagcggtatcagctcactcaaaggcggtaatacggttatccacagaatcaggggataacgcaggaaagaacatgtgagcaaaaggccagcaaaaggccaggaaccgtaaaaaggccgcgttgctggcgtttttccataggctccgcccccctgacgagcatcacaaaaatcgacgctcaagtcagaggtggcgaaacccgacaggactataaagataccaggcgtttccccctggaagctccctcgtgcgctctcctgttccgaccctgccgcttaccggatacctgtccgcctttctcccttcgggaagcgtggcgctttctcatagctcacgctgtaggtatctcagttcggtgtaggtcgttcgctccaagctgggctgtgtgcacgaaccccccgttcagcccgaccgctgcgccttatccggtaactatcgtcttgagtccaacccggtaagacacgacttatcgccactggcagcagccactggtaacaggattagcagagcgaggtatgtaggcggtgctacagagttcttgaagtggtggcctaactacggctacactagaaggacagtatttggtatctgcgctctgctgaagccagttaccttcggaaaaagagttggtagctcttgatccggcaaacaaaccaccgctggtagcggtggtttttttgtttgcaagcagcagattacgcgcagaaaaaaaggatctcaagaagatcctttgatcttttctacggggtctgacgctcagtggaacgaaaactcacgttaagggattttggtcatgagattatcaaaaaggatcttcacctagatccttttaaattaaaaatgaagttttaaatcaagttgcgactgtagagcgttgaccctgacacaatacttacgattaccctgttatccctacgctaccttcggtgaaagtgagtcggcacaatctcgtaatgtgaacactgcttcgccacttattgatagtcgcaacgggagcgatcgctaaaagcagcgattcgtggctcagtcccagagtcgtatctagctagtcaggtagtaaaaggtctcaactaggcagtggcagagcaggattcaaattcagggctgttgtgatgcctccgcagactctgagcgccacctggtggtaatttgtctgtgcctcttctgacgtggaagaacagcaactaacacactaacacggcatttactatgggccagccattgttctaaagccctcgttcacagagaaagttcggttacactgcggatttcgacattgattattgactagttattaatagtaatcaattacggggtcattagttcatagcccatatatggagttccgcgttacataacttacggtaaatggcccgcctggctgaccgcccaacgacccccgcccattgacgtcaataatgacgtatgttcccatagtaacgccaatagggactttccattgacgtcaatgggtggactatttacggtaaactgcccacttggcagtacatcaagtgtatcatatgccaagtacgccccctattgacgtcaatgacggtaaatggcccgcctggcattatgcccagtacatgaccttatgggactttcctacttggcagtacatctacgtattagtcatcgctattaccatgggtcgaggtgagccccacgttctgcttcactctccccatctcccccccctccccacccccaattttgtatttatttattttttaattattttgtgcagcgatgggggcggggggggggggggcgcgcgccaggcggggcggggcggggcgaggggcggggcggggcgaggcggagaggtgcggcggcagccaatcagagcggcgcgctccgaaagtttccttttatggcgaggcggcggcggcggcggccctataaaaagcgaagcgcgcggcgggcgggagtcgctgcgttgccttcgccccgtgccccgctccgcgccgcctcgcgccgcccgccccggctctgactgaccgcgttactcccacaggtgagcgggcgggacggcccttctcctccgggctgtaattagcgcttggtttaatgacggctcgtttcttttctgtggctgcgtgaaagccttaaagggctccgggagggccctttgtgcgggggggagcggctcggggggtgcgtgcgtgtgtgtgtgcgtggggagcgccgcgtgcggcccgcgctgcccggcggctgtgagcgctgcgggcgcggcgcggggctttgtgcgctccgcgtgtgcgcgaggggagcgcggccgggggcggtgccccgcggtgcgggggggctgcgaggggaacaaaggctgcgtgcggggtgtgtgcgtgggggggtgagcagggggtgtgggcgcggcggtcgggctgtaacccccccctgcacccccctccccgagttgctgagcacggcccggcttcgggtgcggggctccgtgcggggcgtggcgcggggctcgccgtgccgggcggggggtggcggcaggtgggggtgccgggcggggcggggccgcctcgggccggggagggctcgggggaggggcgcggcggccccggagcgccggcggctgtcgaggcgcggcgagccgcagccattgccttttatggtaatcgtgcgagagggcgcagggacttcctttgtcccaaatctggcggagccgaaatctgggaggcgccgccgcaccccctctagcgggcgcgggcgaagcggtgcggcgccggcaggaaggaaatgggcggggagggccttcgtgcgtcgccgcgccgccgtccccttctccatctccagcctcggggctgccgcagggggacggctgccttcgggggggacggggcagggcggggttcggcttctggcgtgtgaccggcggctctagagcctctgctaaccatgttcatgccttcttctttttcctacagctcctgggcaacgtgctggttattgtgctgtctcatcattttggcaaaggcacctgtgattgcctcgggagttgaaatacacccagattgccaccatgaccgagtacaagcccacggtgcgcctcgccacccgcgacgacgtccccagggccgtacgcaccctcgccgccgcgttcgccgactaccccgccacgcgccacaccgtcgatccggaccgccacatcgagcgggtcaccgagctgcaagaactcttcctcacgcgcgtcgggctcgacatcggcaaggtgtgggtcgcggacgacggcgccgcggtggcggtctggaccacgccggagagcgtcgaagcgggggcggtgttcgccgagatcggcccgcgcatggccgagttgagcggttcccggctggccgcgcagcaacagatggaaggcctcctggcgccgcaccggcccaaggagcccgcgtggttcctggccaccgtcggcgtctcgcccgaccaccagggcaagggtctgggcagcgccgtcgtgctccccggagtggaggcggccgagcgcgccggggtgcccgccttcctggagacctccgcgccccgcaacctccccttctacgagcggctcggcttcaccgtcaccgccgacgtcgaggtgcccgaaggaccgcgcacctggtgcatgacccgcaagcccggtgccggcggcgggtccggaggagagggcagaggaagtctcctaacatgcggtgacgtggaggagaatcctggcccaatgggcccttggagccgcagcctctcggcgctgctgctgctgctgcaggtctcctcttggctctgccaggagccggagatggtgagcaagggcgaggagctgttcaccggggtggtgcccatcctggtcgagctggacggcgacgtaaacggccacaagttcagcgtgtccggcgagggcgagggcgatgccacctacggcaagctgaccctgaagttcatctgcaccaccggcaagctgcccgtgccctggcccaccctcgtgaccaccctgacctacggcgtgcagtgcttcagccgctaccccgaccacatgaagcagcacgacttcttcaagtccgccatgcccgaaggctacgtccaggagcgcaccatcttcttcaaggacgacggcaactacaagacccgcgccgaggtgaagttcgagggcgacaccctggtgaaccgcatcgagctgaagggcatcgacttcaaggaggacggcaacatcctggggcacaagctggagtacaactacaacagccacaacgtctatatcatggccgacaagcagaagaacggcatcaaggtgaacttcaagatccgccacaacatcgaggacggcagcgtgcagctcgccgaccactaccagcagaacacccccatcggcgacggccccgtgctgctgcccgacaaccactacctgagcacccagtccgccctgagcaaagaccccaacgagaagcgcgatcacatggtcctgctggagttcgtgaccgccgccgggatcactctcggcatggatgaactataccctgccattctggggattcttggaggaattcttgctttgctaattctgattctgctgctcttgctgtttcttcggaggagagcggtggtcaaagagcccttactgcccccagaggatgacacccgggacaacgtttattactatgatgaagaaggaggcggagaagaggaccaggactttgacttgagccagctgcacaggggcctggacgctcggcctgaagtgactcgtaacgacgttgcaccaaccctcatgagtgtcccccggtatcttccccgccctgccaatcccgatgaaattggaaattttattgatgaaaatctgaaagcggctgatactgaccccacagccccgccttatgattctctgctcgtgtttgactatgaaggaagcggttccgaagctgctagtctgagctccctgaactcctcagagtcagacaaagaccaggactatgactacttgaacgaatggggcaatcgcttcaagaagctggctgacatgtacggaggcggcgaggacgactagttaccaatagtcggcggttatcagcggaccctacgaagttggagtaacgaccttgaagacgagtacagagttccggtttgaatcaacctctggattacaaaatttgtgaaagattgactggtattcttaactatgttgctccttttacgctatgtggatacgctgctttaatgcctttgtatcatgctattgcttcccgtatggctttcattttctcctccttgtataaatcctggttgctgtctctttatgaggagttgtggcccgttgtcaggcaacgtggcgtggtgtgcactgtgtttgctgacgcaacccccactggttggggcattgccaccacctgtcagctcctttccgggactttcgctttccccctccctattgccacggcggaactcatcgccgcctgccttgcccgctgctggacaggggctcggctgttgggcactgacaattccgtggtgttgtcctcgagtctagagggcccgtttaaacccgctgatcagcctcgactgtgccttctagttgccagccatctgttgtttgcccctcccccgtgccttccttgaccctggaaggtgccactcccactgtcctttcctaataaaatgaggaaattgcatcgcattgtctgagtaggtgtcattctattctggggggtggggtggggcaggacagcaagggggaggattgggaagacaatagcaggcatgctggggatgcggtgggctctatggctatgagttcgttccctccttgcctcctggtggtagatagttctccaaccgaagtgtttacggaagatagagcccgctgttagccctgagtctgcgttgtaagagcaataggtccactacgcgatcgcgcttttaccacgaacgataataggttggcgggtcactccaaaaagggtcgtgcggcgatactacaatctcctgttactcgtagggataacagggtaatcctgaaaagtggataaccagcaccgttgtgagtgtctcctagacgtcaggtggcacttttcggggaaatgtgcgcggaacccctatttgtttatttttctaaatacattcaaatatgtatccgctcatgagacaataaccctgataaatgcttcaataatattgaaaaaggaagagtatgagtattcaacatttccgtgtcgcccttattcccttttttgcggcattttgccttcctgtttttgctcacccagaaacgctggtgaaagtaaaagatgctgaagatcagttgggtgcacgagtgggttacatcgaactggatctcaacagcggtaagatccttgagagttttcgccccgaagaacgttttccaatgatgagcacttttaaagttctgctatgtggcgcggtattatcccgtgttgacgccgggcaagagcaactcggtcgccgcatacactattctcagaatgacttggttgagtactcaccagtcacagaaaagcatcttacggatggcatgacagtaagagaattatgcagtgctgccataaccatgagtgataacactgcggccaacttacttctgacaacgatcggaggaccgaaggagctaaccgcttttttgcacaacatgggggatcatgtaactcgccttgatcgttgggaaccggagctgaatgaagccataccaaacgacgagcgtgacaccacgatgcctgcagcaatggcaacaacgttgcgcaaactattaa

SEQ ID NO: 81 - DNA, 10170 bp, synthetic construct
  source 1..10170: mol_type = other DNA
ctggcgaactacttactctagcttcccggcaacaattaatagactggatggaggcggataaagttgcaggaccacttctgcgctcggcccttccggctggctggtttattgctgataaatctggagccggtgagcgtgggtctcgcggtatcattgcagcactggggccagatggtaagccctcccgtatcgtagttatctacacgacggggagtcaggcaactatggatgaacgaaatagacagatcgctgagataggtgcctcactgattaagcattggtaactgtcagaccaagtttactcatatatactttagacgcagtccctgtcctgagtagtaaacttccgaatagagtgattctgacaccgtgagtaagcacaggtcgggtcttcaatcatcgtctacggattgggacaccgaggtttctgaactcaacatgatcgtgctcctgtcgttgaggacccggctaggctggcggggttgccttactggttagcagaatgaatcaccgatacgcgagcgaacgtgaagcgactgctgctgcaaaacgtctgcgacctgagcaacaacatgaatggtcttcggtttccgtgtttcgtaaagtctggaaacgcggaagtcagcgccctgcaccattatgttccggatctgcatcgcaggatgctgctggctaccctgtggaacacctacatctgtattaacgaagcgctggcattgaccctgagtgatttttctctggtcccgccgcatccataccgccagttgtttaccctcacaacgttccagtaaccgggcatgttcatcatcagtaacccgtatcgtgagcatcctctctcgtttcatcggtatcattacccccatgaacagaaatcccccttacacggaggcatcagtgaccaaacaggaaaaaaccgcccttaacatggcccgctttatcagaagccagacattaacgcttctggagaaactcaacgagctggacgcggatgaacaggcagacatctgtgaatcgcttcacgaccacgctgatgagctttaccgcagctgcctcgcgcgtttcggtgatgacggtgaaaacctctgacacatgcagctcccggagacggtcacagcttgtctgtaagcggatgccgggagcagacaagcccgtcagggcgcgtcagcgggtgttggcgggtgtcggggcgcagccatgacccagtcacgtagcgatagcggagtgtatactggcttaactatgcggcatcagagcagattgtactgagagtgcaccatatgcggtgtgaaataccgcacagatgcgtaaggagaaaataccgcatcaggcgctcttccgcttcctcgctcactgactcgctgcgctcggtcgttcggctgcggcgagcggtatcagctcactcaaaggcggtaatacggttatccacagaatcaggggataacgcaggaaagaacatgtgagcaaaaggccagcaaaaggccaggaaccgtaaaaaggccgcgttgctggcgtttttccataggctccgcccccctgacgagcatcacaaaaatcgacgctcaagtcagaggtggcgaaacccgacaggactataaagataccaggcgtttccccctggaagctccctcgtgcgctctcctgttccgaccctgccgcttaccggatacctgtccgcctttctcccttcgggaagcgtggcgctttctcatagctcacgctgtaggtatctcagttcggtgtaggtcgttcgctccaagctgggctgtgtgcacgaaccccccgttcagcccgaccgctgcgccttatccggtaactatcgtcttgagtccaacccggtaagacacgacttatcgccactggcagcagccactggtaacaggattagcagagcgaggtatgtaggcggtgctacagagttcttgaagtggtggcctaactacggctacactagaaggacagtatttggtatctgcgctctgctgaagccagttaccttcggaaaaagagttggtagctcttgatccggcaaacaaaccaccgctggtagcggtggtttttttgtttgcaagcagcagattacgcgcagaaaaaaaggatctcaagaagatcctttgatcttttctacggggtctgacgctcagtggaacgaaaactcacgttaagggattttggtcatgagattatcaaaaaggatcttcacctagatccttttaaattaaaaatgaagttttaaatcaagttgcgactgtagagcgttgaccctgacacaatacttacgattaccctgttatccctacgctaccttcggtgaaagtgagtcggcacaatctcgtaatgtgaacactgcttcgccacttattgatagtcgcaacgggagcgatcgctaaaagcagcgattcgtggctcagtcccagagtcgtatctagctagtcaggtagtaaaaggtctcaactaggcagtggcagagcaggattcaaattcagggctgttgtgatgcctccgcagactctgagcgccacctggtggtaatttgtctgtgcctcttctgacgtggaagaacagcaactaacacactaacacggcatttactatgggccagccattgttctaaagccctcgttcacagagaaagttcggttacactgcggatttcgacattgattattgactagttattaatagtaatcaattacggggtcattagttcatagcccatatatggagttccgcgttacataacttacggtaaatggcccgcctggctgaccgcccaacgacccccgcccattgacgtcaataatgacgtatgttcccatagtaacgccaatagggactttccattgacgtcaatgggtggactatttacggtaaactgcccacttggcagtacatcaagtgtatcatatgccaagtacgccccctattgacgtcaatgacggtaaatggcccgcctggcattatgcccagtacatgaccttatgggactttcctacttggcagtacatctacgtattagtcatcgctattaccatgggtcgaggtgagccccacgttctgcttcactctccccatctcccccccctccccacccccaattttgtatttatttattttttaattattttgtgcagcgatgggggcggggggggggggggcgcgcgccaggcggggcggggcggggcgaggggcggggcggggcgaggcggagaggtgcggcggcagccaatcagagcggcgcgctccgaaagtttccttttatggcgaggcggcggcggcggcggccctataaaaagcgaagcgcgcggcgggcgggagtcgctgcgttgccttcgccccgtgccccgctccgcgccgcctcgcgccgcccgccccggctctgactgaccgcgttactcccacaggtgagcgggcgggacggcccttctcctccgggctgtaattagcgcttggtttaatgacggctcgtttcttttctgtggctgcgtgaaagccttaaagggctccgggagggccctttgtgcgggggggagcggctcggggggtgcgtgcgtgtgtgtgtgcgtggggagcgccgcgtgcggcccgcgctgcccggcggctgtgagcgctgcgggcgcggcgcggggctttgtgcgctccgcgtgtgcgcgaggggagcgcggccgggggcggtgccccgcggtgcgggggggctgcgaggggaacaaaggctgcgtgcggggtgtgtgcgtgggggggtgagcagggggtgtgggcgcggcggtcgggctgtaacccccccctgcacccccctccccgagttgctgagcacggcccggcttcgggtgcggggctccgtgcggggcgtggcgcggggctcgccgtgccgggcggggggtggcggcaggtgggggtgccgggcggggcggggccgcctcgggccggggagggctcgggggaggggcgcggcggccccggagcgccggcggctgtcgaggcgcggcgagccgcagccattgccttttatggtaatcgtgcgagagggcgcagggacttcctttgtcccaaatctggcggagccgaaatctgggaggcgccgccgcaccccctctagcgggcgcgggcgaagcggtgcggcgccggcaggaaggaaatgggcggggagggccttcgtgcgtcgccgcgccgccgtccccttctccatctccagcctcggggctgccgcagggggacggctgccttcgggggggacggggcagggcggggttcggcttctggcgtgtgaccggcggctctagagcctctgctaaccatgttcatgccttcttctttttcctacagctcctgggcaacgtgctggttattgtgctgtctcatcattttggcaaaggcacctgtgattgcctcgggagttgaaatacacccagattgccaccatgaccgagtacaagcccacggtgcgcctcgccacccgcgacgacgtccccagggccgtacgcaccctcgccgccgcgttcgccgactaccccgccacgcgccacaccgtcgatccggaccgccacatcgagcgggtcaccgagctgcaagaactcttcctcacgcgcgtcgggctcgacatcggcaaggtgtgggtcgcggacgacggcgccgcggtggcggtctggaccacgccggagagcgtcgaagcgggggcggtgttcgccgagatcggcccgcgcatggccgagttgagcggttcccggctggccgcgcagcaacagatggaaggcctcctggcgccgcaccggcccaaggagcccgcgtggttcctggccaccgtcggcgtctcgcccgaccaccagggcaagggtctgggcagcgccgtcgtgctccccggagtggaggcggccgagcgcgccggggtgcccgccttcctggagacctccgcgccccgcaacctccccttctacgagcggctcggcttcaccgtcaccgccgacgtcgaggtgcccgaaggaccgcgcacctggtgcatgacccgcaagcccggtgccggcggcgggtccggaggagagggcagaggaagtctcctaacatgcggtgacgtggaggagaatcctggcccaatgggagcccggtgccgcagcttttccgcgctcctgctcctgctgcaggtctcctcatggctttgccaggagctggagcctgagtcctgcagtcccggcttcagttccgaggtctacaccttcccggtgccggagaggcacctggagagaggccatgtcctgggcagagtgagatttgaaggatgcactggccggccaaggacagccttcttttcggaagactcccgattcaaagtggcgacagacggcaccatcacagtgaagcggcatctaaagctccacaagctggagaccagtttcctcgtccgcgcccgggactccagtcatagggagctgtctaccaaagtgacgctgaagtccatggggcaccaccatcaccggcaccaccaccgcgaccctgcctctgaatccaacccagagctgctcatgtttcccagcgtgtacccaggtctcagaagacagaaacgagactgggtcatccctcccatcagctgccccatggtgagcaagggcgaggagctgttcaccggggtggtgcccatcctggtcgagctggacggcgacgtaaacggccacaagttcagcgtgtccggcgagggcgagggcgatgccacctacggcaagctgaccctgaagttcatctgcaccaccggcaagctgcccgtgccctggcccaccctcgtgaccaccctgacctacggcgtgcagtgcttcagccgctaccccgaccacatgaagcagcacgacttcttcaagtccgccatgcccgaaggctacgtccaggagcgcaccatcttcttcaaggacgacggcaactacaagacccgcgccgaggtgaagttcgagggcgacaccctggtgaaccgcatcgagctgaagggcatcgacttcaaggaggacggcaacatcctggggcacaagctggagtacaactacaacagccacaacgtctatatcatggccgacaagcagaagaacggcatcaaggtgaacttcaagatccgccacaacatcgaggacggcagcgtgcagctcgccgaccactaccagcagaacacccccatcggcgacggccccgtgctgctgcccgacaaccactacctgagcacccagtccgccctgagcaaagaccccaacgagaagcgcgatcacatggtcctgctggagttcgtgaccgccgccgggatcactctcggcatggatgaactatacgaaaatgaaaagggcgaatttccaaagaacctggttcagatcaaatccaacagggacaaagaaacaaaggttttctacagcatcaccggccaaggagctgacaaaccccccgttggcgttttcatcattgagagggagacaggctggctgaaagtgacacagcctctggatagagaagccattgccaagtacatcctctattctcatgccgtgtcatcaaatggggaagcggtggaggatcccatggagatagtgatcacagtgacagatcagaatgacaacaggccagagtttacccagccggtctttgagggattcgttgcagaaggcgctgttccaggaacctccgtgatgaaggtctcagccaccgatgcagacgatgacgtcaacacctacaacgctgccatcgcctacaccatcgtcagccaggatcctgagctgcctcacaaaaacatgttcactgtcaatagggacaccggggtcatcagtgtgctcacctctgggctggaccgagagagttaccctacatacactctggtggttcaggctgctgaccttcaaggtgaaggcttgagcacaacagccaaggctgtgatcactgtcaaggatattaatgacaacgctcctgtcttcaacccaagcacgtatcagggtcaagtgcctgagaatgaggtcaatgcccggatcgccacactcaaagtgaccgatgatgatgcccccaacactccggcgtggaaagctgtgtacaccgtagtcaacgatcctgaccagcagttcgttgttgtcacagaccccacgaccaatgatggcattttgaaaacagccaagggcttggattttgaggccaagcagcaatacatccttcatgtgagagtggagaacgaggaaccctttgaggggtctcttgtcccttccacagccactgtcactgtggacgtggtagacgtgaatgaagcccccatctttatgcctgcggagaggagagtcgaagtgcccgaagactttggtgtgggtcaggaaatcacatcttataccgctcgagagccggacacgttcatggatcagaagatcacgtatcggatttggagggacactgccaactggctggagattaacccagagactggtgccattttcacgcgcgctgagatggacagagaagacgctgagcatgtgaagaacagcacatatgtagctctcatcatcgccacagatgatggttcacccattgccactggcacgggcactcttctcctggtcctgttagacgtcaatgacaacgctcccatcccagaacctcgaaacatgcagttctgccagaggaacccacagcctcatatcatcaccatcttggatccagaccttccccccaacacgtccccctttactgctgagctaacccatggggccagcgtcaactggaccattgagtataatgacgcagctcaagaatctctcattttgcaaccaagaaaggacttagagattggcgaatacaaaatccatctcaagctcgcggataaccagaacaaagaccaggtgaccacgttggacgtccatgtgtgtgactgtgaagggacggtcaacaactgcatgaaggcgggaatcgtggcagcaggattgcaagttcctgccatcctcggaatccttggagggatcctcgccctgctgattctgatcctgctgctcctactgtttctacggaggagaacggtggtcaaagagcccctgctgccaccagatgatgatacccgggacaatgtgtattactatgatgaagaaggaggtggagaagaagaccaggactttgatttgagccagctgcacaggggcctggatgcccgaccggaagtgactcgaaatgatgtggctcccaccctcatgagcgtgccccagtatcgtccccgtcctgccaatcctgatgaaattggaaacttcatcgatgaaaacctgaaggcagccgacagcgaccccacggcacccccttacgactctctgttggtgttcgattacgagggcagtggttctgaagccgctagcctgagctcactgaactcctctgagtcggatcaggaccaggactacgattatctgaacgagtggggcaaccgattcaagaagctggcggacatgtacggcggtggtgaggacgactagttaccaatagtcggcggttatcagcggaccctacgaagttggagtaacgaccttgaagacgagtacagagttccggtttgaatcaacctctggattacaaaatttgtgaaagattgactggtattcttaactatgttgctccttttacgctatgtggatacgctgctttaatgcctttgtatcatgctattgcttcccgtatggctttcattttctcctccttgtataaatcctggttgctgtctctttatgaggagttgtggcccgttgtcaggcaacgtggcgtggtgtgcactgtgtttgctgacgcaacccccactggttggggcattgccaccacctgtcagctcctttccgggactttcgctttccccctccctattgccacggcggaactcatcgccgcctgccttgcccgctgctggacaggggctcggctgttgggcactgacaattccgtggtgttgtcctcgagtctagagggcccgtttaaacccgctgatcagcctcgactgtgccttctagttgccagccatctgttgtttgcccctcccccgtgccttccttgaccctggaaggtgccactcccactgtcctttcctaataaaatgaggaaattgcatcgcattgtctgagtaggtgtcattctattctggggggtggggtggggcaggacagcaagggggaggattgggaagacaatagcaggcatgctggggatgcggtgggctctatggctatgagttcgttccctccttgcctcctggtggtagatagttctccaaccgaagtgtttacggaagatagagcccgctgttagccctgagtctgcgttgtaagagcaataggtccactacgcgatcgcgcttttaccacgaacgataataggttggcgggtcactccaaaaagggtcgtgcggcgatactacaatctcctgttactcgtagggataacagggtaatcctgaaaagtggataaccagcaccgttgtgagtgtctcctagacgtcaggtggcacttttcggggaaatgtgcgcggaacccctatttgtttatttttctaaatacattcaaatatgtatccgctcatgagacaataaccctgataaatgcttcaataatattgaaaaaggaagagtatgagtattcaacatttccgtgtcgcccttattcccttttttgcggcattttgccttcctgtttttgctcacccagaaacgctggtgaaagtaaaagatgctgaagatcagttgggtgcacgagtgggttacatcgaactggatctcaacagcggtaagatccttgagagttttcgccccgaagaacgttttccaatgatgagcacttttaaagttctgctatgtggcgcggtattatcccgtgttgacgccgggcaagagcaactcggtcgccgcatacactattctcagaatgacttggttgagtactcaccagtcacagaaaagcatcttacggatggcatgacagtaagagaattatgcagtgctgccataaccatgagtgataacactgcggccaacttacttctgacaacgatcggaggaccgaaggagctaaccgcttttttgcacaacatgggggatcatgtaactcgccttgatcgttgggaaccggagctgaatgaagccataccaaacgacgagcgtgacaccacgatgcctgcagcaatggcaacaacgttgcgcaaactattaa

SEQ ID NO: 82 - DNA, 7710 bp, synthetic construct
  source 1..7710: mol_type = other DNA
gttgtttaccctcacaacgttccagtaaccgggcatgttcatcatcagtaacccgtatcgtgagcatcctctctcgtttcatcggtatcattacccccatgaacagaaatcccccttacacggaggcatcagtgaccaaacaggaaaaaaccgcccttaacatggcccgctttatcagaagccagacattaacgcttctggagaaactcaacgagctggacgcggatgaacaggcagacatctgtgaatcgcttcacgaccacgctgatgagctttaccgcagctgcctcgcgcgtttcggtgatgacggtgaaaacctctgacacatgcagctcccggagacggtcacagcttgtctgtaagcggatgccgggagcagacaagcccgtcagggcgcgtcagcgggtgttggcgggtgtcggggcgcagccatgacccagtcacgtagcgatagcggagtgtatactggcttaactatgcggcatcagagcagattgtactgagagtgcaccatatgcggtgtgaaataccgcacagatgcgtaaggagaaaataccgcatcaggcgctcttccgcttcctcgctcactgactcgctgcgctcggtcgttcggctgcggcgagcggtatcagctcactcaaaggcggtaatacggttatccacagaatcaggggataacgcaggaaagaacatgtgagcaaaaggccagcaaaaggccaggaaccgtaaaaaggccgcgttgctggcgtttttccataggctccgcccccctgacgagcatcacaaaaatcgacgctcaagtcagaggtggcgaaacccgacaggactataaagataccaggcgtttccccctggaagctccctcgtgcgctctcctgttccgaccctgccgcttaccggatacctgtccgcctttctcccttcgggaagcgtggcgctttctcatagctcacgctgtaggtatctcagttcggtgtaggtcgttcgctccaagctgggctgtgtgcacgaaccccccgttcagcccgaccgctgcgccttatccggtaactatcgtcttgagtccaacccggtaagacacgacttatcgccactggcagcagccactggtaacaggattagcagagcgaggtatgtaggcggtgctacagagttcttgaagtggtggcctaactacggctacactagaaggacagtatttggtatctgcgctctgctgaagccagttaccttcggaaaaagagttggtagctcttgatccggcaaacaaaccaccgctggtagcggtggtttttttgtttgcaagcagcagattacgcgcagaaaaaaaggatctcaagaagatcctttgatcttttctacggggtctgacgctcagtggaacgaaaactcacgttaagggattttggtcatgagattatcaaaaaggatcttcacctagatccttttaaattaaaaatgaagttttaaatcaagttgcgactgtagagcgttgaccctgacacaatacttacgattaccctgttatccctacgctaccttcggtgaaagtgagtcggcacaatctcgtaatgtgaacactgcttcgccacttattgatagtcgcaacgggagcgatcgctaaaagcagcgattcgtggctcagtcccagagtcgtatctagctagtcaggtagtaaaaggtctcaactaggcagtggcagagcaggattcaaattcagggctgttgtgatgcctccgcagactctgagcgccacctggtggtaatttgtctgtgcctcttctgacgtggaagaacagcaactaacacactaacacggcatttactatgggccagccattgttctaaagccctcgttcacagagaaagttcggttacactgcggatttcgacattgattattgactagttattaatagtaatcaattacggggtcattagttcatagcccatatatggagttccgcgttacataacttacggtaaatggcccgcctggctgaccgcccaacgacccccgcccattgacgtcaataatgacgtatgttcccatagtaacgccaatagggactttccattgacgtcaatgggtggactatttacggtaaactgcccacttggcagtacatcaagtgtatcatatgccaagtacgccccctattgacgtcaatgacggtaaatggcccgcctggcattatgcccagtacatgaccttatgggactttcctacttggcagtacatctacgtattagtcatcgctattaccatgggtcgaggtgagccccacgttctgcttcactctccccatctcccccccctccccacccccaattttgtatttatttattttttaattattttgtgcagcgatgggggcggggggggggggggcgcgcgccaggcggggcggggcggggcgaggggcggggcggggcgaggcggagaggtgcggcggcagccaatcagagcggcgcgctccgaaagtttccttttatggcgaggcggcggcggcggcggccctataaaaagcgaagcgcgcggcgggcgggagtcgctgcgttgccttcgccccgtgccccgctccgcgccgcctcgcgccgcccgccccggctctgactgaccgcgttactcccacaggtgagcgggcgggacggcccttctcctccgggctgtaattagcgcttggtttaatgacggctcgtttcttttctgtggctgcgtgaaagccttaaagggctccgggagggccctttgtgcgggggggagcggctcggggggtgcgtgcgtgtgtgtgtgcgtggggagcgccgcgtgcggcccgcgctgcccggcggctgtgagcgctgcgggcgcggcgcggggctttgtgcgctccgcgtgtgcgcgaggggagcgcggccgggggcggtgccccgcggtgcgggggggctgcgaggggaacaaaggctgcgtgcggggtgtgtgcgtgggggggtgagcagggggtgtgggcgcggcggtcgggctgtaacccccccctgcacccccctccccgagttgctgagcacggcccggcttcgggtgcggggctccgtgcggggcgtggcgcggggctcgccgtgccgggcggggggtggcggcaggtgggggtgccgggcggggcggggccgcctcgggccggggagggctcgggggaggggcgcggcggccccggagcgccggcggctgtcgaggcgcggcgagccgcagccattgccttttatggtaatcgtgcgagagggcgcagggacttcctttgtcccaaatctggcggagccgaaatctgggaggcgccgccgcaccccctctagcgggcgcgggcgaagcggtgcggcgccggcaggaaggaaatgggcggggagggccttcgtgcgtcgccgcgccgccgtccccttctccatctccagcctcggggctgccgcagggggacggctgccttcgggggggacggggcagggcggggttcggcttctggcgtgtgaccggcggctctagagcctctgctaaccatgttcatgccttcttctttttcctacagctcctgggcaacgtgctggttattgtgctgtctcatcattttggcaaaggcacctgtgattgcctcgggagttgaaatacacccagattgccaccatgaccgagtacaagcccacggtgcgcctcgccacccgcgacgacgtccccagggccgtacgcaccctcgccgccgcgttcgccgactaccccgccacgcgccacaccgtcgatccggaccgccacatcgagcgggtcaccgagctgcaagaactcttcctcacgcgcgtcgggctcgacatcggcaaggtgtgggtcgcggacgacggcgccgcggtggcggtctggaccacgccggagagcgtcgaagcgggggcggtgttcgccgagatcggcccgcgcatggccgagttgagcggttcccggctggccgcgcagcaacagatggaaggcctcctggcgccgcaccggcccaaggagcccgcgtggttcctggccaccgtcggcgtctcgcccgaccaccagggcaagggtctgggcagcgccgtcgtgctccccggagtggaggcggccgagcgcgccggggtgcccgccttcctggagacctccgcgccccgcaacctccccttctacgagcggctcggcttcaccgtcaccgccgacgtcgaggtgcccgaaggaccgcgcacctggtgcatgacccgcaagcccggtgccggcggcgggtccggaggagagggcagaggaagtctcctaacatgcggtgacgtggaggagaatcctggcccaatggcctctactggtctgcaaatcttggggatcgtcctgaccctgcttggctgggtcaacgccctggtgtcctgtgccctgcccatgtggaaggtgaccgccttcatcggcaacatgcaggttcaactggtggaaagcggcggtgctctggtacaaccgggcggtagtctgcgcctgagctgtgccgcaagcggtttcccagtcaaccgctactctatgcgttggtatcgccaggcgcctggtaaagaacgtgaatgggttgccggcatgagcagtgcgggcgatcgttctagttacgaggactctgttaaaggtcgttttacaattagccgtgatgatgcgcgcaataccgtgtatctgcaaatgaacagtctgaagccggaggacaccgcagtatattattgcaatgtcaacgtggggtttgaatattggggccaggggactcaggtgacggtgagctctgcgctgccccaggacctgcaggctgccagagccctctgtgttgtcaccctcctcattgtcctgcttggcctgctcgtgtacctggctggagccaagtgcactacctgtgtggaagataggaactccaagtctcgtctggtgctcatctctggcatcatctttgtcatttctggggtcctgacgctcattcctgtctgctggactgcccactctatcatccaggacttctacaaccccttggtggctgatgctcaaaagcgggagctgggggcctccctctacctgggctgggcagcctcaggccttttgctgctgggtggagggctactatgctgcgcctgctcttctggagggacccagggacccagacattacatggcctgctattctacatctgtcccacattctcggggaccctccgaatatcccaccaagaattatgtgtgattaccaatagtcggcggttatcagcggaccctacgaagttggagtaacgaccttgaagacgagtacagagttccggtttgaatcaacctctggattacaaaatttgtgaaagattgactggtattcttaactatgttgctccttttacgctatgtggatacgctgctttaatgcctttgtatcatgctattgcttcccgtatggctttcattttctcctccttgtataaatcctggttgctgtctctttatgaggagttgtggcccgttgtcaggcaacgtggcgtggtgtgcactgtgtttgctgacgcaacccccactggttggggcattgccaccacctgtcagctcctttccgggactttcgctttccccctccctattgccacggcggaactcatcgccgcctgccttgcccgctgctggacaggggctcggctgttgggcactgacaattccgtggtgttgtcctcgagtctagagggcccgtttaaacccgctgatcagcctcgactgtgccttctagttgccagccatctgttgtttgcccctcccccgtgccttccttgaccctggaaggtgccactcccactgtcctttcctaataaaatgaggaaattgcatcgcattgtctgagtaggtgtcattctattctggggggtggggtggggcaggacagcaagggggaggattgggaagacaatagcaggcatgctggggatgcggtgggctctatggctatgagttcgttccctccttgcctcctggtggtagatagttctccaaccgaagtgtttacggaagatagagcccgctgttagccctgagtctgcgttgtaagagcaataggtccactacgcgatcgcgcttttaccacgaacgataataggttggcgggtcactccaaaaagggtcgtgcggcgatactacaatctcctgttactcgtagggataacagggtaatcctgaaaagtggataaccagcaccgttgtgagtgtctcctagacgtcaggtggcacttttcggggaaatgtgcgcggaacccctatttgtttatttttctaaatacattcaaatatgtatccgctcatgagacaataaccctgataaatgcttcaataatattgaaaaaggaagagtatgagtattcaacatttccgtgtcgcccttattcccttttttgcggcattttgccttcctgtttttgctcacccagaaacgctggtgaaagtaaaagatgctgaagatcagttgggtgcacgagtgggttacatcgaactggatctcaacagcggtaagatccttgagagttttcgccccgaagaacgttttccaatgatgagcacttttaaagttctgctatgtggcgcggtattatcccgtgttgacgccgggcaagagcaactcggtcgccgcatacactattctcagaatgacttggttgagtactcaccagtcacagaaaagcatcttacggatggcatgacagtaagagaattatgcagtgctgccataaccatgagtgataacactgcggccaacttacttctgacaacgatcggaggaccgaaggagctaaccgcttttttgcacaacatgggggatcatgtaactcgccttgatcgttgggaaccggagctgaatgaagccataccaaacgacgagcgtgacaccacgatgcctgcagcaatggcaacaacgttgcgcaaactattaactggcgaactacttactctagcttcccggcaacaattaatagactggatggaggcggataaagttgcaggaccacttctgcgctcggcccttccggctggctggtttattgctgataaatctggagccggtgagcgtgggtctcgcggtatcattgcagcactggggccagatggtaagccctcccgtatcgtagttatctacacgacggggagtcaggcaactatggatgaacgaaatagacagatcgctgagataggtgcctcactgattaagcattggtaactgtcagaccaagtttactcatatatactttagacgcagtccctgtcctgagtagtaaacttccgaatagagtgattctgacaccgtgagtaagcacaggtcgggtcttcaatcatcgtctacggattgggacaccgaggtttctgaactcaacatgatcgtgctcctgtcgttgaggacccggctaggctggcggggttgccttactggttagcagaatgaatcaccgatacgcgagcgaacgtgaagcgactgctgctgcaaaacgtctgcgacctgagcaacaacatgaatggtcttcggtttccgtgtttcgtaaagtctggaaacgcggaagtcagcgccctgcaccattatgttccggatctgcatcgcaggatgctgctggctaccctgtggaacacctacatctgtattaacgaagcgctggcattgaccctgagtgatttttctctggtcccgccgcatccataccgcca

SEQ ID NO: 83 - DNA, 7755 bp, synthetic construct
  source 1..7755: mol_type = other DNA
gttgtttaccctcacaacgttccagtaaccgggcatgttcatcatcagtaacccgtatcgtgagcatcctctctcgtttcatcggtatcattacccccatgaacagaaatcccccttacacggaggcatcagtgaccaaacaggaaaaaaccgcccttaacatggcccgctttatcagaagccagacattaacgcttctggagaaactcaacgagctggacgcggatgaacaggcagacatctgtgaatcgcttcacgaccacgctgatgagctttaccgcagctgcctcgcgcgtttcggtgatgacggtgaaaacctctgacacatgcagctcccggagacggtcacagcttgtctgtaagcggatgccgggagcagacaagcccgtcagggcgcgtcagcgggtgttggcgggtgtcggggcgcagccatgacccagtcacgtagcgatagcggagtgtatactggcttaactatgcggcatcagagcagattgtactgagagtgcaccatatgcggtgtgaaataccgcacagatgcgtaaggagaaaataccgcatcaggcgctcttccgcttcctcgctcactgactcgctgcgctcggtcgttcggctgcggcgagcggtatcagctcactcaaaggcggtaatacggttatccacagaatcaggggataacgcaggaaagaacatgtgagcaaaaggccagcaaaaggccaggaaccgtaaaaaggccgcgttgctggcgtttttccataggctccgcccccctgacgagcatcacaaaaatcgacgctcaagtcagaggtggcgaaacccgacaggactataaagataccaggcgtttccccctggaagctccctcgtgcgctctcctgttccgaccctgccgcttaccggatacctgtccgcctttctcccttcgggaagcgtggcgctttctcatagctcacgctgtaggtatctcagttcggtgtaggtcgttcgctccaagctgggctgtgtgcacgaaccccccgttcagcccgaccgctgcgccttatccggtaactatcgtcttgagtccaacccggtaagacacgacttatcgccactggcagcagccactggtaacaggattagcagagcgaggtatgtaggcggtgctacagagttcttgaagtggtggcctaactacggctacactagaaggacagtatttggtatctgcgctctgctgaagccagttaccttcggaaaaagagttggtagctcttgatccggcaaacaaaccaccgctggtagcggtggtttttttgtttgcaagcagcagattacgcgcagaaaaaaaggatctcaagaagatcctttgatcttttctacggggtctgacgctcagtggaacgaaaactcacgttaagggattttggtcatgagattatcaaaaaggatcttcacctagatccttttaaattaaaaatgaagttttaaatcaagttgcgactgtagagcgttgaccctgacacaatacttacgattaccctgttatccctacgctaccttcggtgaaagtgagtcggcacaatctcgtaatgtgaacactgcttcgccacttattgatagtcgcaacgggagcgatcgctaaaagcagcgattcgtggctcagtcccagagtcgtatctagctagtcaggtagtaaaaggtctcaactaggcagtggcagagcaggattcaaattcagggctgttgtgatgcctccgcagactctgagcgccacctggtggtaatttgtctgtgcctcttctgacgtggaagaacagcaactaacacactaacacggcatttactatgggccagccattgttctaaagccctcgttcacagagaaagttcggttacactgcggatttcgacattgattattgactagttattaatagtaatcaattacggggtcattagttcatagcccatatatggagttccgcgttacataacttacggtaaatggcccgcctggctgaccgcccaacgacccccgcccattgacgtcaataatgacgtatgttcccatagtaacgccaatagggactttccattgacgtcaatgggtggactatttacggtaaactgcccacttggcagtacatcaagtgtatcatatgccaagtacgccccctattgacgtcaatgacggtaaatggcccgcctggcattatgcccagtacatgaccttatgggactttcctacttggcagtacatctacgtattagtcatcgctattaccatgggtcgaggtgagccccacgttctgcttcactctccccatctcccccccctccccacccccaattttgtatttatttattttttaattattttgtgcagcgatgggggcggggggggggggggcgcgcgccaggcggggcggggcggggcgaggggcggggcggggcgaggcggagaggtgcggcggcagccaatcagagcggcgcgctccgaaagtttccttttatggcgaggcggcggcggcggcggccctataaaaagcgaagcgcgcggcgggcgggagtcgctgcgttgccttcgccccgtgccccgctccgcgccgcctcgcgccgcccgccccggctctgactgaccgcgttactcccacaggtgagcgggcgggacggcccttctcctccgggctgtaattagcgcttggtttaatgacggctcgtttcttttctgtggctgcgtgaaagccttaaagggctccgggagggccctttgtgcgggggggagcggctcggggggtgcgtgcgtgtgtgtgtgcgtggggagcgccgcgtgcggcccgcgctgcccggcggctgtgagcgctgcgggcgcggcgcggggctttgtgcgctccgcgtgtgcgcgaggggagcgcggccgggggcggtgccccgcggtgcgggggggctgcgaggggaacaaaggctgcgtgcggggtgtgtgcgtgggggggtgagcagggggtgtgggcgcggcggtcgggctgtaacccccccctgcacccccctccccgagttgctgagcacggcccggcttcgggtgcggggctccgtgcggggcgtggcgcggggctcgccgtgccgggcggggggtggcggcaggtgggggtgccgggcggggcggggccgcctcgggccggggagggctcgggggaggggcgcggcggccccggagcgccggcggctgtcgaggcgcggcgagccgcagccattgccttttatggtaatcgtgcgagagggcgcagggacttcctttgtcccaaatctggcggagccgaaatctgggaggcgccgccgcaccccctctagcgggcgcgggcgaagcggtgcggcgccggcaggaaggaaatgggcggggagggccttcgtgcgtcgccgcgccgccgtccccttctccatctccagcctcggggctgccgcagggggacggctgccttcgggggggacggggcagggcggggttcggcttctggcgtgtgaccggcggctctagagcctctgctaaccatgttcatgccttcttctttttcctacagctcctgggcaacgtgctggttattgtgctgtctcatcattttggcaaaggcacctgtgattgcctcgggagttgaaatacacccagattgccaccatgaccgagtacaagcccacggtgcgcctcgccacccgcgacgacgtccccagggccgtacgcaccctcgccgccgcgttcgccgactaccccgccacgcgccacaccgtcgatccggaccgccacatcgagcgggtcaccgagctgcaagaactcttcctcacgcgcgtcgggctcgacatcggcaaggtgtgggtcgcggacgacggcgccgcggtggcggtctggaccacgccggagagcgtcgaagcgggggcggtgttcgccgagatcggcccgcgcatggccgagttgagcggttcccggctggccgcgcagcaacagatggaaggcctcctggcgccgcaccggcccaaggagcccgcgtggttcctggccaccgtcggcgtctcgcccgaccaccagggcaagggtctgggcagcgccgtcgtgctccccggagtggaggcggccgagcgcgccggggtgcccgccttcctggagacctccgcgccccgcaacctccccttctacgagcggctcggcttcaccgtcaccgccgacgtcgaggtgcccgaaggaccgcgcacctggtgcatgacccgcaagcccggtgccggcggcgggtccggaggagagggcagaggaagtctcctaacatgcggtgacgtggaggagaatcctggcccaatgggcccttggagccgcagcctctcggcgctgctgctgctgctgcaggtctcctcttggctctgccaggagccggagatgcaggttcaactggtggaaagcggcggtgctctggtacaaccgggcggtagtctgcgcctgagctgtgccgcaagcggtttcccagtcaaccgctactctatgcgttggtatcgccaggcgcctggtaaagaacgtgaatgggttgccggcatgagcagtgcgggcgatcgttctagttacgaggactctgttaaaggtcgttttacaattagccgtgatgatgcgcgcaataccgtgtatctgcaaatgaacagtctgaagccggaggacaccgcagtatattattgcaatgtcaacgtggggtttgaatattggggccaggggactcaggtgacggtgagctctcctgccattctggggattcttggaggaattcttgctttgctaattctgattctgctgctcttgctgtttcttcggaggagagcggtggtcaaagagcccttactgcccccagaggatgacacccgggacaacgtttattactatgatgaagaaggaggcggagaagaggaccaggactttgacttgagccagctgcacaggggcctggacgctcggcctgaagtgactcgtaacgacgttgcaccaaccctcatgagtgtcccccggtatcttccccgccctgccaatcccgatgaaattggaaattttattgatgaaaatctgaaagcggctgatactgaccccacagccccgccttatgattctctgctcgtgtttgactatgaaggaagcggttccgaagctgctagtctgagctccctgaactcctcagagtcagacaaagaccaggactatgactacttgaacgaatggggcaatcgcttcaagaagctggctgacatgtacggaggcggcgaggacgactagttaccaatagtcggcggttatcagcggaccctacgaagttggagtaacgaccttgaagacgagtacagagttccggtttgaatcaacctctggattacaaaatttgtgaaagattgactggtattcttaactatgttgctccttttacgctatgtggatacgctgctttaatgcctttgtatcatgctattgcttcccgtatggctttcattttctcctccttgtataaatcctggttgctgtctctttatgaggagttgtggcccgttgtcaggcaacgtggcgtggtgtgcactgtgtttgctgacgcaacccccactggttggggcattgccaccacctgtcagctcctttccgggactttcgctttccccctccctattgccacggcggaactcatcgccgcctgccttgcccgctgctggacaggggctcggctgttgggcactgacaattccgtggtgttgtcctcgagtctagagggcccgtttaaacccgctgatcagcctcgactgtgccttctagttgccagccatctgttgtttgcccctcccccgtgccttccttgaccctggaaggtgccactcccactgtcctttcctaataaaatgaggaaattgcatcgcattgtctgagtaggtgtcattctattctggggggtggggtggggcaggacagcaagggggaggattgggaagacaatagcaggcatgctggggatgcggtgggctctatggctatgagttcgttccctccttgcctcctggtggtagatagttctccaaccgaagtgtttacggaagatagagcccgctgttagccctgagtctgcgttgtaagagcaataggtccactacgcgatcgcgcttttaccacgaacgataataggttggcgggtcactccaaaaagggtcgtgcggcgatactacaatctcctgttactcgtagggataacagggtaatcctgaaaagtggataaccagcaccgttgtgagtgtctcctagacgtcaggtggcacttttcggggaaatgtgcgcggaacccctatttgtttatttttctaaatacattcaaatatgtatccgctcatgagacaataaccctgataaatgcttcaataatattgaaaaaggaagagtatgagtattcaacatttccgtgtcgcccttattcccttttttgcggcattttgccttcctgtttttgctcacccagaaacgctggtgaaagtaaaagatgctgaagatcagttgggtgcacgagtgggttacatcgaactggatctcaacagcggtaagatccttgagagttttcgccccgaagaacgttttccaatgatgagcacttttaaagttctgctatgtggcgcggtattatcccgtgttgacgccgggcaagagcaactcggtcgccgcatacactattctcagaatgacttggttgagtactcaccagtcacagaaaagcatcttacggatggcatgacagtaagagaattatgcagtgctgccataaccatgagtgataacactgcggccaacttacttctgacaacgatcggaggaccgaaggagctaaccgcttttttgcacaacatgggggatcatgtaactcgccttgatcgttgggaaccggagctgaatgaagccataccaaacgacgagcgtgacaccacgatgcctgcagcaatggcaacaacgttgcgcaaactattaactggcgaactacttactctagcttcccggcaacaattaatagactggatggaggcggataaagttgcaggaccacttctgcgctcggcccttccggctggctggtttattgctgataaatctggagccggtgagcgtgggtctcgcggtatcattgcagcactggggccagatggtaagccctcccgtatcgtagttatctacacgacggggagtcaggcaactatggatgaacgaaatagacagatcgctgagataggtgcctcactgattaagcattggtaactgtcagaccaagtttactcatatatactttagacgcagtccctgtcctgagtagtaaacttccgaatagagtgattctgacaccgtgagtaagcacaggtcgggtcttcaatcatcgtctacggattgggacaccgaggtttctgaactcaacatgatcgtgctcctgtcgttgaggacccggctaggctggcggggttgccttactggttagcagaatgaatcaccgatacgcgagcgaacgtgaagcgactgctgctgcaaaacgtctgcgacctgagcaacaacatgaatggtcttcggtttccgtgtttcgtaaagtctggaaacgcggaagtcagcgccctgcaccattatgttccggatctgcatcgcaggatgctgctggctaccctgtggaacacctacatctgtattaacgaagcgctggcattgaccctgagtgatttttctctggtcccgccgcatccataccgcca

SEQ ID NO: 84 - DNA, 9804 bp, synthetic construct
  source 1..9804: mol_type = other DNA
tcgctcactgactcgctgcgctcggtcgttcggctgcggcgagcggtatcagctcactcaaaggcggtaatacggttatccacagaatcaggggataacgcaggaaagaacatgtgagcaaaaggccagcaaaaggccaggaaccgtaaaaaggccgcgttgctggcgtttttccataggctccgcccccctgacgagcatcacaaaaatcgacgctcaagtcagaggtggcgaaacccgacaggactataaagataccaggcgtttccccctggaagctccctcgtgcgctctcctgttccgaccctgccgcttaccggatacctgtccgcctttctcccttcgggaagcgtggcgctttctcatagctcacgctgtaggtatctcagttcggtgtaggtcgttcgctccaagctgggctgtgtgcacgaaccccccgttcagcccgaccgctgcgccttatccggtaactatcgtcttgagtccaacccggtaagacacgacttatcgccactggcagcagccactggtaacaggattagcagagcgaggtatgtaggcggtgctacagagttcttgaagtggtggcctaactacggctacactagaaggacagtatttggtatctgcgctctgctgaagccagttaccttcggaaaaagagttggtagctcttgatccggcaaacaaaccaccgctggtagcggtggtttttttgtttgcaagcagcagattacgcgcagaaaaaaaggatctcaagaagatcctttgatcttttctacggggtctgacgctcagtggaacgaaaactcacgttaagggattttggtcatgagattatcaaaaaggatcttcacctagatccttttaaattaaaaatgaagttttaaatcaagttgcgactgtagagcgttgaccctgacacaatacttacgattaccctgttatccctacgctaccttcggtgaaagtgagtcggcacaatctcgtaatgtgaacactgcttcgccacttattgatagtcgcaacgggagcgatcgctaaaagcagcgattcgtggctcagtcccagagtcgtatctagctagtcaggtagtaaaaggtctcaactaggcagtggcagagcaggattcaaattcagggctgttgtgatgcctccgcagactctgagcgccacctggtggtaatttgtctgtgcctcttctgacgtggaagaacagcaactaacacactaacacggcatttactatgggccagccattgttctaaagccctcgttcacagagaaagttcggttacactgcggatttcgacattgattattgactagttattaatagtaatcaattacggggtcattagttcatagcccatatatggagttccgcgttacataacttacggtaaatggcccgcctggctgaccgcccaacgacccccgcccattgacgtcaataatgacgtatgttcccatagtaacgccaatagggactttccattgacgtcaatgggtggactatttacggtaaactgcccacttggcagtacatcaagtgtatcatatgccaagtacgccccctattgacgtcaatgacggtaaatggcccgcctggcattatgcccagtacatgaccttatgggactttcctacttggcagtacatctacgtattagtcatcgctattaccatgggtcgaggtgagccccacgttctgcttcactctccccatctcccccccctccccacccccaattttgtatttatttattttttaattattttgtgcagcgatgggggcggggggggggggggcgcgcgccaggcggggcggggcggggcgaggggcggggcggggcgaggcggagaggtgcggcggcagccaatcagagcggcgcgctccgaaagtttccttttatggcgaggcggcggcggcggcggccctataaaaagcgaagcgcgcggcgggcgggagtcgctgcgttgccttcgccccgtgccccgctccgcgccgcctcgcgccgcccgccccggctctgactgaccgcgttactcccacaggtgagcgggcgggacggcccttctcctccgggctgtaattagcgcttggtttaatgacggctcgtttcttttctgtggctgcgtgaaagccttaaagggctccgggagggccctttgtgcgggggggagcggctcggggggtgcgtgcgtgtgtgtgtgcgtggggagcgccgcgtgcggcccgcgctgcccggcggctgtgagcgctgcgggcgcggcgcggggctttgtgcgctccgcgtgtgcgcgaggggagcgcggccgggggcggtgccccgcggtgcgggggggctgcgaggggaacaaaggctgcgtgcggggtgtgtgcgtgggggggtgagcagggggtgtgggcgcggcggtcgggctgtaacccccccctgcacccccctccccgagttgctgagcacggcccggcttcgggtgcggggctccgtgcggggcgtggcgcggggctcgccgtgccgggcggggggtggcggcaggtgggggtgccgggcggggcggggccgcctcgggccggggagggctcgggggaggggcgcggcggccccggagcgccggcggctgtcgaggcgcggcgagccgcagccattgccttttatggtaatcgtgcgagagggcgcagggacttcctttgtcccaaatctggcggagccgaaatctgggaggcgccgccgcaccccctctagcgggcgcgggcgaagcggtgcggcgccggcaggaaggaaatgggcggggagggccttcgtgcgtcgccgcgccgccgtccccttctccatctccagcctcggggctgccgcagggggacggctgccttcgggggggacggggcagggcggggttcggcttctggcgtgtgaccggcggctctagagcctctgctaaccatgttcatgccttcttctttttcctacagctcctgggcaacgtgctggttattgtgctgtctcatcattttggcaaaggcacctgtgattgcctcgggagttgaaatacacccagattgccaccatgaccgagtacaagcccacggtgcgcctcgccacccgcgacgacgtccccagggccgtacgcaccctcgccgccgcgttcgccgactaccccgccacgcgccacaccgtcgatccggaccgccacatcgagcgggtcaccgagctgcaagaactcttcctcacgcgcgtcgggctcgacatcggcaaggtgtgggtcgcggacgacggcgccgcggtggcggtctggaccacgccggagagcgtcgaagcgggggcggtgttcgccgagatcggcccgcgcatggccgagttgagcggttcccggctggccgcgcagcaacagatggaaggcctcctggcgccgcaccggcccaaggagcccgcgtggttcctggccaccgtcggcgtctcgcccgaccaccagggcaagggtctgggcagcgccgtcgtgctccccggagtggaggcggccgagcgcgccggggtgcccgccttcctggagacctccgcgccccgcaacctccccttctacgagcggctcggcttcaccgtcaccgccgacgtcgaggtgcccgaaggaccgcgcacctggtgcatgacccgcaagcccggtgccggcggcgggtccggaggagagggcagaggaagtctcctaacatgcggtgacgtggaggagaatcctggcccaatgggagcccggtgccgcagcttttccgcgctcctgctcctgctgcaggtctcctcatggctttgccaggagctggagcctgagtcctgcagtcccggcttcagttccgaggtctacaccttcccggtgccggagaggcacctggagagaggccatgtcctgggcagagtgagatttgaaggatgcactggccggccaaggacagccttcttttcggaagactcccgattcaaagtggcgacagacggcaccatcacagtgaagcggcatctaaagctccacaagctggagaccagtttcctcgtccgcgcccgggactccagtcatagggagctgtctaccaaagtgacgctgaagtccatggggcaccaccatcaccggcaccaccaccgcgaccctgcctctgaatccaacccagagctgctcatgtttcccagcgtgtacccaggtctcagaagacagaaacgagactgggtcatccctcccatcagctgccccatgcaggttcaactggtggaaagcggcggtgctctggtacaaccgggcggtagtctgcgcctgagctgtgccgcaagcggtttcccagtcaaccgctactctatgcgttggtatcgccaggcgcctggtaaagaacgtgaatgggttgccggcatgagcagtgcgggcgatcgttctagttacgaggactctgttaaaggtcgttttacaattagccgtgatgatgcgcgcaataccgtgtatctgcaaatgaacagtctgaagccggaggacaccgcagtatattattgcaatgtcaacgtggggtttgaatattggggccaggggactcaggtgacggtgagctctgaaaatgaaaagggcgaatttccaaagaacctggttcagatcaaatccaacagggacaaagaaacaaaggttttctacagcatcaccggccaaggagctgacaaaccccccgttggcgttttcatcattgagagggagacaggctggctgaaagtgacacagcctctggatagagaagccattgccaagtacatcctctattctcatgccgtgtcatcaaatggggaagcggtggaggatcccatggagatagtgatcacagtgacagatcagaatgacaacaggccagagtttacccagccggtctttgagggattcgttgcagaaggcgctgttccaggaacctccgtgatgaaggtctcagccaccgatgcagacgatgacgtcaacacctacaacgctgccatcgcctacaccatcgtcagccaggatcctgagctgcctcacaaaaacatgttcactgtcaatagggacaccggggtcatcagtgtgctcacctctgggctggaccgagagagttaccctacatacactctggtggttcaggctgctgaccttcaaggtgaaggcttgagcacaacagccaaggctgtgatcactgtcaaggatattaatgacaacgctcctgtcttcaacccaagcacgtatcagggtcaagtgcctgagaatgaggtcaatgcccggatcgccacactcaaagtgaccgatgatgatgcccccaacactccggcgtggaaagctgtgtacaccgtagtcaacgatcctgaccagcagttcgttgttgtcacagaccccacgaccaatgatggcattttgaaaacagccaagggcttggattttgaggccaagcagcaatacatccttcatgtgagagtggagaacgaggaaccctttgaggggtctcttgtcccttccacagccactgtcactgtggacgtggtagacgtgaatgaagcccccatctttatgcctgcggagaggagagtcgaagtgcccgaagactttggtgtgggtcaggaaatcacatcttataccgctcgagagccggacacgttcatggatcagaagatcacgtatcggatttggagggacactgccaactggctggagattaacccagagactggtgccattttcacgcgcgctgagatggacagagaagacgctgagcatgtgaagaacagcacatatgtagctctcatcatcgccacagatgatggttcacccattgccactggcacgggcactcttctcctggtcctgttagacgtcaatgacaacgctcccatcccagaacctcgaaacatgcagttctgccagaggaacccacagcctcatatcatcaccatcttggatccagaccttccccccaacacgtccccctttactgctgagctaacccatggggccagcgtcaactggaccattgagtataatgacgcagctcaagaatctctcattttgcaaccaagaaaggacttagagattggcgaatacaaaatccatctcaagctcgcggataaccagaacaaagaccaggtgaccacgttggacgtccatgtgtgtgactgtgaagggacggtcaacaactgcatgaaggcgggaatcgtggcagcaggattgcaagttcctgccatcctcggaatccttggagggatcctcgccctgctgattctgatcctgctgctcctactgtttctacggaggagaacggtggtcaaagagcccctgctgccaccagatgatgatacccgggacaatgtgtattactatgatgaagaaggaggtggagaagaagaccaggactttgatttgagccagctgcacaggggcctggatgcccgaccggaagtgactcgaaatgatgtggctcccaccctcatgagcgtgccccagtatcgtccccgtcctgccaatcctgatgaaattggaaacttcatcgatgaaaacctgaaggcagccgacagcgaccccacggcacccccttacgactctctgttggtgttcgattacgagggcagtggttctgaagccgctagcctgagctcactgaactcctctgagtcggatcaggaccaggactacgattatctgaacgagtggggcaaccgattcaagaagctggcggacatgtacggcggtggtgaggacgactagttaccaatagtcggcggttatcagcggaccctacgaagttggagtaacgaccttgaagacgagtacagagttccggtttgaatcaacctctggattacaaaatttgtgaaagattgactggtattcttaactatgttgctccttttacgctatgtggatacgctgctttaatgcctttgtatcatgctattgcttcccgtatggctttcattttctcctccttgtataaatcctggttgctgtctctttatgaggagttgtggcccgttgtcaggcaacgtggcgtggtgtgcactgtgtttgctgacgcaacccccactggttggggcattgccaccacctgtcagctcctttccgggactttcgctttccccctccctattgccacggcggaactcatcgccgcctgccttgcccgctgctggacaggggctcggctgttgggcactgacaattccgtggtgttgtcctcgagtctagagggcccgtttaaacccgctgatcagcctcgactgtgccttctagttgccagccatctgttgtttgcccctcccccgtgccttccttgaccctggaaggtgccactcccactgtcctttcctaataaaatgaggaaattgcatcgcattgtctgagtaggtgtcattctattctggggggtggggtggggcaggacagcaagggggaggattgggaagacaatagcaggcatgctggggatgcggtgggctctatggctatgagttcgttccctccttgcctcctggtggtagatagttctccaaccgaagtgtttacggaagatagagcccgctgttagccctgagtctgcgttgtaagagcaataggtccactacgcgatcgcgcttttaccacgaacgataataggttggcgggtcactccaaaaagggtcgtgcggcgatactacaatctcctgttactcgtagggataacagggtaatcctgaaaagtggataaccagcaccgttgtgagtgtctcctagacgtcaggtggcacttttcggggaaatgtgcgcggaacccctatttgtttatttttctaaatacattcaaatatgtatccgctcatgagacaataaccctgataaatgcttcaataatattgaaaaaggaagagtatgagtattcaacatttccgtgtcgcccttattcccttttttgcggcattttgccttcctgtttttgctcacccagaaacgctggtgaaagtaaaagatgctgaagatcagttgggtgcacgagtgggttacatcgaactggatctcaacagcggtaagatccttgagagttttcgccccgaagaacgttttccaatgatgagcacttttaaagttctgctatgtggcgcggtattatcccgtgttgacgccgggcaagagcaactcggtcgccgcatacactattctcagaatgacttggttgagtactcaccagtcacagaaaagcatcttacggatggcatgacagtaagagaattatgcagtgctgccataaccatgagtgataacactgcggccaacttacttctgacaacgatcggaggaccgaaggagctaaccgcttttttgcacaacatgggggatcatgtaactcgccttgatcgttgggaaccggagctgaatgaagccataccaaacgacgagcgtgacaccacgatgcctgcagcaatggcaacaacgttgcgcaaactattaactggcgaactacttactctagcttcccggcaacaattaatagactggatggaggcggataaagttgcaggaccacttctgcgctcggcccttccggctggctggtttattgctgataaatctggagccggtgagcgtgggtctcgcggtatcattgcagcactggggccagatggtaagccctcccgtatcgtagttatctacacgacggggagtcaggcaactatggatgaacgaaatagacagatcgctgagataggtgcctcactgattaagcattggtaactgtcagaccaagtttactcatatatactttagacgcagtccctgtcctgagtagtaaacttccgaatagagtgattctgacaccgtgagtaagcacaggtcgggtcttcaatcatcgtctacggattgggacaccgaggtttctgaactcaacatgatcgtgctcctgtcgttgaggacccggctaggctggcggggttgccttactggttagcagaatgaatcaccgatacgcgagcgaacgtgaagcgactgctgctgcaaaacgtctgcgacctgagcaacaacatgaatggtcttcggtttccgtgtttcgtaaagtctggaaacgcggaagtcagcgccctgcaccattatgttccggatctgcatcgcaggatgctgctggctaccctgtggaacacctacatctgtattaacgaagcgctggcattgaccctgagtgatttttctctggtcccgccgcatccataccgccagttgtttaccctcacaacgttccagtaaccgggcatgttcatcatcagtaacccgtatcgtgagcatcctctctcgtttcatcggtatcattacccccatgaacagaaatcccccttacacggaggcatcagtgaccaaacaggaaaaaaccgcccttaacatggcccgctttatcagaagccagacattaacgcttctggagaaactcaacgagctggacgcggatgaacaggcagacatctgtgaatcgcttcacgaccacgctgatgagctttaccgcagctgcctcgcgcgtttcggtgatgacggtgaaaacctctgacacatgcagctcccggagacggtcacagcttgtctgtaagcggatgccgggagcagacaagcccgtcagggcgcgtcagcgggtgttggcgggtgtcggggcgcagccatgacccagtcacgtagcgatagcggagtgtatactggcttaactatgcggcatcagagcagattgtactgagagtgcaccatatgcggtgtgaaataccgcacagatgcgtaaggagaaaataccgcatcaggcgctcttccgcttcc

SEQ ID NO: 85 - DNA, 5485 bp, synthetic construct
  source 1..5485: mol_type = other DNA
aacccgtatcgtgagcatcctctctcgtttcatcggtatcattacccccatgaacagaaatcccccttacacggaggcatcagtgaccaaacaggaaaaaaccgcccttaacatggcccgctttatcagaagccagacattaacgcttctggagaaactcaacgagctggacgcggatgaacaggcagacatctgtgaatcgcttcacgaccacgctgatgagctttaccgcagctgcctcgcgcgtttcggtgatgacggtgaaaacctctgacacatgcagctcccggagacggtcacagcttgtctgtaagcggatgccgggagcagacaagcccgtcagggcgcgtcagcgggtgttggcgggtgtcggggcgcagccatgacccagtcacgtagcgatagcggagtgtatactggcttaactatgcggcatcagagcagattgtactgagagtgcaccatatgcggtgtgaaataccgcacagatgcgtaaggagaaaataccgcatcaggcgctcttccgcttcctcgctcactgactcgctgcgctcggtcgttcggctgcggcgagcggtatcagctcactcaaaggcggtaatacggttatccacagaatcaggggataacgcaggaaagaacatgtgagcaaaaggccagcaaaaggccaggaaccgtaaaaaggccgcgttgctggcgtttttccataggctccgcccccctgacgagcatcacaaaaatcgacgctcaagtcagaggtggcgaaacccgacaggactataaagataccaggcgtttccccctggaagctccctcgtgcgctctcctgttccgaccctgccgcttaccggatacctgtccgcctttctcccttcgggaagcgtggcgctttctcatagctcacgctgtaggtatctcagttcggtgtaggtcgttcgctccaagctgggctgtgtgcacgaaccccccgttcagcccgaccgctgcgccttatccggtaactatcgtcttgagtccaacccggtaagacacgacttatcgccactggcagcagccactggtaacaggattagcagagcgaggtatgtaggcggtgctacagagttcttgaagtggtggcctaactacggctacactagaaggacagtatttggtatctgcgctctgctgaagccagttaccttcggaaaaagagttggtagctcttgatccggcaaacaaaccaccgctggtagcggtggtttttttgtttgcaagcagcagattacgcgcagaaaaaaaggatctcaagaagatcctttgatcttttctacggggtctgacgctcagtggaacgaaaactcacgttaagggattttggtcatgagattatcaaaaaggatcttcacctagatccttttaaattaaaaatgaagttttaaatcaagttgcgactgtagagcgttgaccctgacacaatacttacggcgatgcagctagattaaccctagaaagatagtctgcgtaaaattgacgcatgcattcttgaaatattgctctctctttctaaatagcgcgaatccgtcgctgtgcatttaggacatctcagtcgccgcttggagctcccgtgaggcgtgcttgtcaatgcggtaagtgtcactgattttgaactataacaaccgcgtgagtcaaaatgacgcatgattatcttttacgtgacttttaagatttaactcatacgataattatattgttatttcgtgttctacttacgtgataacttattatatatatattttcttgttatagatcgttacataacttacggtaaatggcccgcctggctgaccgcccaacgacccccgcccattgacgtcaataatgacgtatgttcccatagtaacgccaatagggactttccattgacgtcaatgggtggagtatttacggtaaactgcccacttggcagtacatcaagtgtatcatatgccaagtacgccccctattgacgtcaatgacggtaaatggcccgcctggcattatgcccagtacatgaccttatgggactttcctacttggcagtacatctacgtattagtcatcgctattaccatggtcgaggtgagccccacgttctgcttcactctccccatctcccccccctccccacccccaattttgtatttatttattttttaattattttgtgcagcgatgggggcggggggggggggggggcgcgcgccaggcggggcggggcggggcgaggggcggggcggggcgaggcggagaggtgcggcggcagccaatcagagcggcgcgctccgaaagtttccttttatggcgaggcggcggcggcggcggccctataaaaagcgaagcgcgcggcgggcggggagtcgctgcgacgctgccttcgccccgtgccccgctccgccgccgcctcgcgccgcccgccccggctctgactgaccgcgttactcccacaggtgagcgggcgggacggcccttctcctccgggctgtaattagcgcttggtttaatgacggcttgtttcttttctgtggctgcgtgaaagccttgaggggctccgggagggccctttgtgcggggggagcggctcggggggtgcgtgcgtgtgtgtgtgcgtggggagcgccgcgtgcggctccgcgctgcccggcggctgtgagcgctgcgggcgcggcgcggggctttgtgcgctccgcagtgtgcgcgaggggagcgcggccgggggcggtgccccgcggtgcggggggggctgcgaggggaacaaaggctgcgtgcggggtgtgtgcgtgggggggtgagcagggggtgtgggcgcgtcggtcgggctgcaaccccccctgcacccccctccccgagttgctgagcacggcccggcttcgggtgcggggctccgtacggggcgtggcgcggggctcgccgtgccgggcggggggtggcggcaggtgggggtgccgggcggggcggggccgcctcgggccggggagggctcgggggaggggcgcggcggcccccggagcgccggcggctgtcgaggcgcggcgagccgcagccattgccttttatggtaatcgtgcgagagggcgcagggacttcctttgtcccaaatctgtgcggagccgaaatctgggaggcgccgccgcaccccctctagcgggcgcggggcgaagcggtgcggcgccggcaggaaggaaatgggcggggagggccttcgtgcgtcgccgcgccgccgtccccttctccctctccagcctcggggctgtccgcggggggacggctgccttcgggggggacggggcagggcggggttcggcttctggcgtgtgaccggcggctctagagcctctgctaaccatgttcatgccttcttctttttcctacaggcacctgtgattgcctcgggagttgaaatacacccagattgaattcgatatcaagcttttaccaatagtcggcggttatcagcggaccctacgaagttctgtgccttctagttgccagccatctgttgtttgcccctcccccgtgccttccttgaccctggaaggtgccactcccactgtcctttcctaataaaatgaggaaattgcatcgcattgtctgagtaggtgtcattctattctggggggtggggtggggcaggacagcaagggggaggattgggaagagaatagcaggcatgctggggagcggccgcgataaaagttttgttactttatagaagaaattttgagtttttgtttttttttaataaataaataaacataaataaattgtttgttgaatttattattagtatgtaagtgtaaatataataaaacttaatatctattcaaattaataaataaacctcgatatacagaccgataaaacacatgcgtcaattttacgcatgattatctttaacgtacgtcacaatatgattatctttctagggttaatctagctgccctgaaaagtggataaccagcaccgttgtgagtgtctcctagacgtcaggtggcacttttcggggaaatgtgcgcggaacccctatttgtttatttttctaaatacattcaaatatgtatccgctcatgagacaataaccctgataaatgcttcaataatattgaaaaaggaagagtatgagtattcaacatttccgtgtcgcccttattcccttttttgcggcattttgccttcctgtttttgctcacccagaaacgctggtgaaagtaaaagatgctgaagatcagttgggtgcacgagtgggttacatcgaactggatctcaacagcggtaagatccttgagagttttcgccccgaagaacgttttccaatgatgagcacttttaaagttctgctatgtggcgcggtattatcccgtgttgacgccgggcaagagcaactcggtcgccgcatacactattctcagaatgacttggttgagtactcaccagtcacagaaaagcatcttacggatggcatgacagtaagagaattatgcagtgctgccataaccatgagtgataacactgcggccaacttacttctgacaacgatcggaggaccgaaggagctaaccgcttttttgcacaacatgggggatcatgtaactcgccttgatcgttgggaaccggagctgaatgaagccataccaaacgacgagcgtgacaccacgatgcctgcagcaatggcaacaacgttgcgcaaactattaactggcgaactacttactctagcttcccggcaacaattaatagactggatggaggcggataaagttgcaggaccacttctgcgctcggcccttccggctggctggtttattgctgataaatctggagccggtgagcgtgggtctcgcggtatcattgcagcactggggccagatggtaagccctcccgtatcgtagttatctacacgacggggagtcaggcaactatggatgaacgaaatagacagatcgctgagataggtgcctcactgattaagcattggtaactgtcagaccaagtttactcatatatactttagacgcagtccctgtcctgagtagtaaacttccgaatagagtgatcgtctacggattgggacaccgaggtttctgaactcaacatgatcgtgctcctgtcgttgaggacccggctaggctggcggggttgccttactggttagcagaatgaatcaccgatacgcgagcgaacgtgaagcgactgctgctgcaaaacgtctgcgacctgagcaacaacatgaatggtcttcggtttccgtgtttcgtaaagtctggaaacgcggaagtcagcgccctgcaccattatgttccggatctgcatcgcaggatgctgctggctaccctgtggaacacctacatctgtattaacgaagcgctggcattgaccctgagtgatttttctctggtcccgccgcatccataccgccagttgtttaccctcacaacgttccagtaaccgggcatgttcatcatcagt

SEQ ID NO: 86 - DNA, 7233 bp, synthetic construct
  source 1..7233: mol_type = other DNA
agatcaaaggatcttcttgagatcctttttttctgcgcgtaatctgctgcttgcaaacaaaaaaaccaccgctaccagcggtggtttgtttgccggatcaagagctaccaactctttttccgaaggtaactggcttcagcagagcgcagataccaaatactgtccttctagtgtagccgtagttaggccaccacttcaagaactctgtagcaccgcctacatacctcgctctgctaatcctgttaccagtggctgctgccagtggcgataagtcgtgtcttaccgggttggactcaagacgatagttaccggataaggcgcagcggtcgggctgaacggggggttcgtgcacacagcccagcttggagcgaacgacctacaccgaactgagatacctacagcgtgagctatgagaaagcgccacgcttcccgaagggagaaaggcggacaggtatccggtaagcggcagggtcggaacaggagagcgcacgagggagcttccagggggaaacgcctggtatctttatagtcctgtcgggtttcgccacctctgacttgagcgtcgatttttgtgatgctcgtcaggggggcggagcctatggaaaaacgccagcaacgcggcctttttacggttcctggccttttgctggccttttgctcacatgttctttcctgcgttatcccctgattctgtggataaccgtattaccgcctttgagtgagctgataccgctcgccgcagccgaacgaccgagcgcagcgagtcagtgagcgaggaagcggaagagcgcccaatacgcaaaccgcctctccccgcgcgttggccgattcattaatgcagctggcacgacaggtttcccgactggaaagcgggcagtgagcgcaacgcaattaatgtgagttagctcactcattaggcaccccaggctttacactttatgcttccggctcgtatgttgtgtggaattgtgagcggataacaatttcacacaggaaacagctatgaccatgattacgccaagcgcgcaattaaccctcactaaagggaacaaaagctggagctccaccgcggggcgcgccgcagctagattaaccctagaaagatagtctgcgtaaaattgacgcatgcattcttgaaatattgctctctctttctaaatagcgcgaatccgtcgctgtgcatttaggacatctcagtcgccgcttggagctcccgtgaggcgtgcttgtcaatgcggtaagtgtcactgattttgaactataacaaccgcgtgagtcaaaatgacgcatgattatcttttacgtgacttttaagatttaactcatacgataattatattgttatttcgtgttctacttacgtgataacttattatatatatattttcttgttatagatgggaattcagacatgataagatacattgatgagtttggacaaaccacaactagaatgcagtgaaaaaaatgctttatttgtgaaatttgtgatgctattgctttatttgtaaccattataagctgcaataaacaagtttcgaggtcgagtgtcagtcctgctcctcggccacgaagtcgttacataacttacggtaaatggcccgcctggctgaccgcccaacgacccccgcccattgacgtcaataatgacgtatgttcccatagtaacgccaatagggactttccattgacgtcaatgggtggagtatttacggtaaactgcccacttggcagtacatcaagtgtatcatatgccaagtacgccccctattgacgtcaatgacggtaaatggcccgcctggcattatgcccagtacatgaccttatgggactttcctacttggcagtacatctacgtattagtcatcgctattaccatggtcgaggtgagccccacgttctgcttcactctccccatctcccccccctccccacccccaattttgtatttatttattttttaattattttgtgcagcgatgggggcggggggggggggggggcgcgcgccaggcggggcggggcggggcgaggggcggggcggggcgaggcggagaggtgcggcggcagccaatcagagcggcgcgctccgaaagtttccttttatggcgaggcggcggcggcggcggccctataaaaagcgaagcgcgcggcgggcggggagtcgctgcgacgctgccttcgccccgtgccccgctccgccgccgcctcgcgccgcccgccccggctctgactgaccgcgttactcccacaggtgagcgggcgggacggcccttctcctccgggctgtaattagcgcttggtttaatgacggcttgtttcttttctgtggctgcgtgaaagccttgaggggctccgggagggccctttgtgcggggggagcggctcggggggtgcgtgcgtgtgtgtgtgcgtggggagcgccgcgtgcggctccgcgctgcccggcggctgtgagcgctgcgggcgcggcgcggggctttgtgcgctccgcagtgtgcgcgaggggagcgcggccgggggcggtgccccgcggtgcggggggggctgcgaggggaacaaaggctgcgtgcggggtgtgtgcgtgggggggtgagcagggggtgtgggcgcgtcggtcgggctgcaaccccccctgcacccccctccccgagttgctgagcacggcccggcttcgggtgcggggctccgtacggggcgtggcgcggggctcgccgtgccgggcggggggtggcggcaggtgggggtgccgggcggggcggggccgcctcgggccggggagggctcgggggaggggcgcggcggcccccggagcgccggcggctgtcgaggcgcggcgagccgcagccattgccttttatggtaatcgtgcgagagggcgcagggacttcctttgtcccaaatctgtgcggagccgaaatctgggaggcgccgccgcaccccctctagcgggcgcggggcgaagcggtgcggcgccggcaggaaggaaatgggcggggagggccttcgtgcgtcgccgcgccgccgtccccttctccctctccagcctcggggctgtccgcggggggacggctgccttcgggggggacggggcagggcggggttcggcttctggcgtgtgaccggcggctctagagcctctgctaaccatgttcatgccttcttctttttcctacaggcacctgtgattgcctcgggagttgaaatacacccagattgccaccatgaccgagtacaagcccacggtgcgcctcgccacccgcgacgacgtccccagggccgtacgcaccctcgccgccgcgttcgccgactaccccgccacgcgccacaccgtcgatccggaccgccacatcgagcgggtcaccgagctgcaagaactcttcctcacgcgcgtcgggctcgacatcggcaaggtgtgggtcgcggacgacggcgccgcggtggcggtctggaccacgccggagagcgtcgaagcgggggcggtgttcgccgagatcggcccgcgcatggccgagttgagcggttcccggctggccgcgcagcaacagatggaaggcctcctggcgccgcaccggcccaaggagcccgcgtggttcctggccaccgtcggcgtctcgcccgaccaccagggcaagggtctgggcagcgccgtcgtgctccccggagtggaggcggccgagcgcgccggggtgcccgccttcctggagacctccgcgccccgcaacctccccttctacgagcggctcggcttcaccgtcaccgccgacgtcgaggtgcccgaaggaccgcgcacctggtgcatgacccgcaagcccggtgccggcggcgggtccggaggagagggcagaggaagtctcctaacatgcggtgacgtggaggagaatcctggcccaatgaatttacaaccaattttctggattggactgatcagttcagtttgctgtgtgtttgctactagtatggtgagcaagggcgaggagctgttcaccggggtggtgcccatcctggtcgagctggacggcgacgtaaacggccacaagttcagcgtgtccggcgagggcgagggcgatgccacctacggcaagctgaccctgaagttcatctgcaccaccggcaagctgcccgtgccctggcccaccctcgtgaccaccctgacctacggcgtgcagtgcttcagccgctaccccgaccacatgaagcagcacgacttcttcaagtccgccatgcccgaaggctacgtccaggagcgcaccatcttcttcaaggacgacggcaactacaagacccgcgccgaggtgaagttcgagggcgacaccctggtgaaccgcatcgagctgaagggcatcgacttcaaggaggacggcaacatcctggggcacaagctggagtacaactacaacagccacaacgtctatatcatggccgacaagcagaagaacggcatcaaggtgaacttcaagatccgccacaacatcgaggacggcagcgtgcagctcgccgaccactaccagcagaacacccccatcggcgacggccccgtgctgctgcccgacaaccactacctgagcacccagtccgccctgagcaaagaccccaacgagaagcgcgatcacatggtcctgctggagttcgtgaccgccgccgggatcactctcggcatggatgaactatacaagactagtgtggagaatccagagtgtcccactggtccagacatcattccaattgtagctggtgtggttgctggaattgttcttattggccttgcattactgctgatatggaagcttttaatgataattcatgacagaagggagtttgctaaatttgaaaaggagaaaatgaatgccaaatgggacacgggtgaaaatcctatttataagagtgccgtaacaactgtggtcaatccgaagtatgagggaaaatgattaccaatagtcggcggttatcagcggaccctacgaagttgcggccgcgattaaaaaacctcccacacctccccctgaacctgaaacataaaatgaatgcaattgttgttgttaacttgtttattgcagcttataatggttacaaataaagcaatagcatcacaaatttcacaaataaagcatttttttcactgcattctagttgtggtttgtccaaactcatcaatgtatcttaaggaattcgataaaagttttgttactttatagaagaaattttgagtttttgtttttttttaataaataaataaacataaataaattgtttgttgaatttattattagtatgtaagtgtaaatataataaaacttaatatctattcaaattaataaataaacctcgatatacagaccgataaaacacatgcgtcaattttacgcatgattatctttaacgtacgtcacaatatgattatctttctagggttaatctagctgcggcgcgccggtacccaattcgccctatagtgagtcgtattacgcgcgctcactggccgtcgttttacaacgtcgtgactgggaaaaccctggcgttacccaacttaatcgccttgcagcacatccccctttcgccagctggcgtaatagcgaagaggcccgcaccgatcgcccttcccaacagttgcgcagcctgaatggcgaatgggacgcgccctgtagcggcgcattaagcgcggcgggtgtggtggttacgcgcagcgtgaccgctacacttgccagcgccctagcgcccgctcctttcgctttcttcccttcctttctcgccacgttcgccggctttccccgtcaagctctaaatcgggggctccctttagggttccgatttagtgctttacggcacctcgaccccaaaaaacttgattagggtgatggttcacgtagtgggccatcgccctgatagacggtttttcgccctttgacgttggagtccacgttctttaatagtggactcttgttccaaactggaacaacactcaaccctatctcggtctattcttttgatttataagggattttgccgatttcggcctattggttaaaaaatgagctgatttaacaaaaatttaacgcgaattttaacaaaatattaacgcttacaatttaggtggcacttttcggggaaatgtgcgcggaacccctatttgtttatttttctaaatacattcaaatatgtatccgctcatgagacaataaccctgataaatgcttcaataatattgaaaaaggaagagtatgagtattcaacatttccgtgtcgcccttattcccttttttgcggcattttgccttcctgtttttgctcacccagaaacgctggtgaaagtaaaagatgctgaagatcagttgggtgcacgagtgggttacatcgaactggatctcaacagcggtaagatccttgagagttttcgccccgaagaacgttttccaatgatgagcacttttaaagttctgctatgtggcgcggtattatcccgtattgacgccgggcaagagcaactcggtcgccgcatacactattctcagaatgacttggttgagtactcaccagtcacagaaaagcatcttacggatggcatgacagtaagagaattatgcagtgctgccataaccatgagtgataacactgcggccaacttacttctgacaacgatcggaggaccgaaggagctaaccgcttttttgcacaacatgggggatcatgtaactcgccttgatcgttgggaaccggagctgaatgaagccataccaaacgacgagcgtgacaccacgatgcctgtagcaatggcaacaacgttgcgcaaactattaactggcgaactacttactctagcttcccggcaacaattaatagactggatggaggcggataaagttgcaggaccacttctgcgctcggcccttccggctggctggtttattgctgataaatctggagccggtgagcgtgggtctcgcggtatcattgcagcactggggccagatggtaagccctcccgtatcgtagttatctacacgacggggagtcaggcaactatggatgaacgaaatagacagatcgctgagataggtgcctcactgattaagcattggtaactgtcagaccaagtttactcatatatactttagattgatttaaaacttcatttttaatttaaaaggatctaggtgaagatcctttttgataatctcatgaccaaaatcccttaacgtgagttttcgttccactgagcgtcagaccccgtagaaa

SEQ ID NO: 87 - DNA, 7614 bp, synthetic construct
  source 1..7614: mol_type = other DNA
agatcaaaggatcttcttgagatcctttttttctgcgcgtaatctgctgcttgcaaacaaaaaaaccaccgctaccagcggtggtttgtttgccggatcaagagctaccaactctttttccgaaggtaactggcttcagcagagcgcagataccaaatactgtccttctagtgtagccgtagttaggccaccacttcaagaactctgtagcaccgcctacatacctcgctctgctaatcctgttaccagtggctgctgccagtggcgataagtcgtgtcttaccgggttggactcaagacgatagttaccggataaggcgcagcggtcgggctgaacggggggttcgtgcacacagcccagcttggagcgaacgacctacaccgaactgagatacctacagcgtgagctatgagaaagcgccacgcttcccgaagggagaaaggcggacaggtatccggtaagcggcagggtcggaacaggagagcgcacgagggagcttccagggggaaacgcctggtatctttatagtcctgtcgggtttcgccacctctgacttgagcgtcgatttttgtgatgctcgtcaggggggcggagcctatggaaaaacgccagcaacgcggcctttttacggttcctggccttttgctggccttttgctcacatgttctttcctgcgttatcccctgattctgtggataaccgtattaccgcctttgagtgagctgataccgctcgccgcagccgaacgaccgagcgcagcgagtcagtgagcgaggaagcggaagagcgcccaatacgcaaaccgcctctccccgcgcgttggccgattcattaatgcagctggcacgacaggtttcccgactggaaagcgggcagtgagcgcaacgcaattaatgtgagttagctcactcattaggcaccccaggctttacactttatgcttccggctcgtatgttgtgtggaattgtgagcggataacaatttcacacaggaaacagctatgaccatgattacgccaagcgcgcaattaaccctcactaaagggaacaaaagctggagctccaccgcggggcgcgccgcagctagattaaccctagaaagatagtctgcgtaaaattgacgcatgcattcttgaaatattgctctctctttctaaatagcgcgaatccgtcgctgtgcatttaggacatctcagtcgccgcttggagctcccgtgaggcgtgcttgtcaatgcggtaagtgtcactgattttgaactataacaaccgcgtgagtcaaaatgacgcatgattatcttttacgtgacttttaagatttaactcatacgataattatattgttatttcgtgttctacttacgtgataacttattatatatatattttcttgttatagatgggaattcagacatgataagatacattgatgagtttggacaaaccacaactagaatgcagtgaaaaaaatgctttatttgtgaaatttgtgatgctattgctttatttgtaaccattataagctgcaataaacaagtttcgaggtcgagtgtcagtcctgctcctcggccacgaagtcgttacataacttacggtaaatggcccgcctggctgaccgcccaacgacccccgcccattgacgtcaataatgacgtatgttcccatagtaacgccaatagggactttccattgacgtcaatgggtggagtatttacggtaaactgcccacttggcagtacatcaagtgtatcatatgccaagtacgccccctattgacgtcaatgacggtaaatggcccgcctggcattatgcccagtacatgaccttatgggactttcctacttggcagtacatctacgtattagtcatcgctattaccatggtcgaggtgagccccacgttctgcttcactctccccatctcccccccctccccacccccaattttgtatttatttattttttaattattttgtgcagcgatgggggcggggggggggggggggcgcgcgccaggcggggcggggcggggcgaggggcggggcggggcgaggcggagaggtgcggcggcagccaatcagagcggcgcgctccgaaagtttccttttatggcgaggcggcggcggcggcggccctataaaaagcgaagcgcgcggcgggcggggagtcgctgcgacgctgccttcgccccgtgccccgctccgccgccgcctcgcgccgcccgccccggctctgactgaccgcgttactcccacaggtgagcgggcgggacggcccttctcctccgggctgtaattagcgcttggtttaatgacggcttgtttcttttctgtggctgcgtgaaagccttgaggggctccgggagggccctttgtgcggggggagcggctcggggggtgcgtgcgtgtgtgtgtgcgtggggagcgccgcgtgcggctccgcgctgcccggcggctgtgagcgctgcgggcgcggcgcggggctttgtgcgctccgcagtgtgcgcgaggggagcgcggccgggggcggtgccccgcggtgcggggggggctgcgaggggaacaaaggctgcgtgcggggtgtgtgcgtgggggggtgagcagggggtgtgggcgcgtcggtcgggctgcaaccccccctgcacccccctccccgagttgctgagcacggcccggcttcgggtgcggggctccgtacggggcgtggcgcggggctcgccgtgccgggcggggggtggcggcaggtgggggtgccgggcggggcggggccgcctcgggccggggagggctcgggggaggggcgcggcggcccccggagcgccggcggctgtcgaggcgcggcgagccgcagccattgccttttatggtaatcgtgcgagagggcgcagggacttcctttgtcccaaatctgtgcggagccgaaatctgggaggcgccgccgcaccccctctagcgggcgcggggcgaagcggtgcggcgccggcaggaaggaaatgggcggggagggccttcgtgcgtcgccgcgccgccgtccccttctccctctccagcctcggggctgtccgcggggggacggctgccttcgggggggacggggcagggcggggttcggcttctggcgtgtgaccggcggctctagagcctctgctaaccatgttcatgccttcttctttttcctacaggcacctgtgattgcctcgggagttgaaatacacccagattgaattcgatgccaccatgaccgagtacaagcccacggtgcgcctcgccacccgcgacgacgtccccagggccgtacgcaccctcgccgccgcgttcgccgactaccccgccacgcgccacaccgtcgatccggaccgccacatcgagcgggtcaccgagctgcaagaactcttcctcacgcgcgtcgggctcgacatcggcaaggtgtgggtcgcggacgacggcgccgcggtggcggtctggaccacgccggagagcgtcgaagcgggggcggtgttcgccgagatcggcccgcgcatggccgagttgagcggttcccggctggccgcgcagcaacagatggaaggcctcctggcgccgcaccggcccaaggagcccgcgtggttcctggccaccgtcggcgtctcgcccgaccaccagggcaagggtctgggcagcgccgtcgtgctccccggagtggaggcggccgagcgcgccggggtgcccgccttcctggagacctccgcgccccgcaacctccccttctacgagcggctcggcttcaccgtcaccgccgacgtcgaggtgcccgaaggaccgcgcacctggtgcatgacccgcaagcccggtgccggcggcgggtccggaggagagggcagaggaagtctcctaacatgcggtgacgtggaggagaatcctggcccaatggcctcaccgttgacccgctttctgtcgctgaacctgctgctgctgggtgagtcgattatcctggggagtggagaagctactagtatggtgagcaagggcgaggaggataacatggccatcatcaaggagttcatgcgcttcaaggtgcacatggagggctccgtgaacggccacgagttcgagatcgagggcgagggcgagggccgcccctacgagggcacccagaccgccaagctgaaggtgaccaagggtggccccctgcccttcgcctgggacatcctgtcccctcagttcatgtacggctccaaggcctacgtgaagcaccccgccgacatccccgactacttgaagctgtccttccccgagggcttcaagtgggagcgcgtgatgaacttcgaggacggcggcgtggtgaccgtgacccaggactcctccctgcaggacggcgagttcatctacaaggtgaagctgcgcggcaccaacttcccctccgacggccccgtaatgcagaagaagaccatgggctgggaggcctcctccgagcggatgtaccccgaggacggcgccctgaagggcgagatcaagcagaggctgaagctgaaggacggcggccactacgacgctgaggtcaagaccacctacaaggccaagaagcccgtgcagctgcccggcgcctacaacgtcaacatcaagttggacatcacctcccacaacgaggactacaccatcgtggaacagtacgaacgcgccgagggccgccactccaccggcggcatggacgagctgtacaagactagtaagccacaggcacccgaactccgaatctttccaaagaaaatggacgccgaacttggtcagaaggtggacctggtatgtgaagtgttggggtccgtttcgcaaggatgctcttggctcttccagaactccagctccaaactcccccagcccaccttcgttgtctatatggcttcatcccacaacaagataacgtgggacgagaagctgaattcgtcgaaactgttttctgccatgagggacacgaataataagtacgttctcaccctgaacaagttcagcaaggaaaacgaaggctactatttctgctcagtcatcagcaactcggtgatgtacttcagttctgtcgtgccagtccttcagaaagtgaactctactactaccaagccagtgctgcgaactccctcacctgtgcaccctaccgggacatctcagccccagagaccagaagattgtcggccccgtggctcagtgaaggggaccggattggacttcgcctgtgatatttacatctgggcacccttggccggaatctgcgtggcccttctgctgtccttgatcatcactctcatctgctaccacagccgcggatccacctaaatcaagcttttaccaatagtcggcggttatcagcggaccctacgaagttgcggccgcgattaaaaaacctcccacacctccccctgaacctgaaacataaaatgaatgcaattgttgttgttaacttgtttattgcagcttataatggttacaaataaagcaatagcatcacaaatttcacaaataaagcatttttttcactgcattctagttgtggtttgtccaaactcatcaatgtatcttaaggaattcgataaaagttttgttactttatagaagaaattttgagtttttgtttttttttaataaataaataaacataaataaattgtttgttgaatttattattagtatgtaagtgtaaatataataaaacttaatatctattcaaattaataaataaacctcgatatacagaccgataaaacacatgcgtcaattttacgcatgattatctttaacgtacgtcacaatatgattatctttctagggttaatctagctgcggcgcgccggtacccaattcgccctatagtgagtcgtattacgcgcgctcactggccgtcgttttacaacgtcgtgactgggaaaaccctggcgttacccaacttaatcgccttgcagcacatccccctttcgccagctggcgtaatagcgaagaggcccgcaccgatcgcccttcccaacagttgcgcagcctgaatggcgaatgggacgcgccctgtagcggcgcattaagcgcggcgggtgtggtggttacgcgcagcgtgaccgctacacttgccagcgccctagcgcccgctcctttcgctttcttcccttcctttctcgccacgttcgccggctttccccgtcaagctctaaatcgggggctccctttagggttccgatttagtgctttacggcacctcgaccccaaaaaacttgattagggtgatggttcacgtagtgggccatcgccctgatagacggtttttcgccctttgacgttggagtccacgttctttaatagtggactcttgttccaaactggaacaacactcaaccctatctcggtctattcttttgatttataagggattttgccgatttcggcctattggttaaaaaatgagctgatttaacaaaaatttaacgcgaattttaacaaaatattaacgcttacaatttaggtggcacttttcggggaaatgtgcgcggaacccctatttgtttatttttctaaatacattcaaatatgtatccgctcatgagacaataaccctgataaatgcttcaataatattgaaaaaggaagagtatgagtattcaacatttccgtgtcgcccttattcccttttttgcggcattttgccttcctgtttttgctcacccagaaacgctggtgaaagtaaaagatgctgaagatcagttgggtgcacgagtgggttacatcgaactggatctcaacagcggtaagatccttgagagttttcgccccgaagaacgttttccaatgatgagcacttttaaagttctgctatgtggcgcggtattatcccgtattgacgccgggcaagagcaactcggtcgccgcatacactattctcagaatgacttggttgagtactcaccagtcacagaaaagcatcttacggatggcatgacagtaagagaattatgcagtgctgccataaccatgagtgataacactgcggccaacttacttctgacaacgatcggaggaccgaaggagctaaccgcttttttgcacaacatgggggatcatgtaactcgccttgatcgttgggaaccggagctgaatgaagccataccaaacgacgagcgtgacaccacgatgcctgtagcaatggcaacaacgttgcgcaaactattaactggcgaactacttactctagcttcccggcaacaattaatagactggatggaggcggataaagttgcaggaccacttctgcgctcggcccttccggctggctggtttattgctgataaatctggagccggtgagcgtgggtctcgcggtatcattgcagcactggggccagatggtaagccctcccgtatcgtagttatctacacgacggggagtcaggcaactatggatgaacgaaatagacagatcgctgagataggtgcctcactgattaagcattggtaactgtcagaccaagtttactcatatatactttagattgatttaaaacttcatttttaatttaaaaggatctaggtgaagatcctttttgataatctcatgaccaaaatcccttaacgtgagttttcgttccactgagcgtcagaccccgtagaaa

SEQ ID NO: 88 - DNA, 6927 bp, synthetic construct
  source 1..6927: mol_type = other DNA
agatcaaaggatcttcttgagatcctttttttctgcgcgtaatctgctgcttgcaaacaaaaaaaccaccgctaccagcggtggtttgtttgccggatcaagagctaccaactctttttccgaaggtaactggcttcagcagagcgcagataccaaatactgtccttctagtgtagccgtagttaggccaccacttcaagaactctgtagcaccgcctacatacctcgctctgctaatcctgttaccagtggctgctgccagtggcgataagtcgtgtcttaccgggttggactcaagacgatagttaccggataaggcgcagcggtcgggctgaacggggggttcgtgcacacagcccagcttggagcgaacgacctacaccgaactgagatacctacagcgtgagctatgagaaagcgccacgcttcccgaagggagaaaggcggacaggtatccggtaagcggcagggtcggaacaggagagcgcacgagggagcttccagggggaaacgcctggtatctttatagtcctgtcgggtttcgccacctctgacttgagcgtcgatttttgtgatgctcgtcaggggggcggagcctatggaaaaacgccagcaacgcggcctttttacggttcctggccttttgctggccttttgctcacatgttctttcctgcgttatcccctgattctgtggataaccgtattaccgcctttgagtgagctgataccgctcgccgcagccgaacgaccgagcgcagcgagtcagtgagcgaggaagcggaagagcgcccaatacgcaaaccgcctctccccgcgcgttggccgattcattaatgcagctggcacgacaggtttcccgactggaaagcgggcagtgagcgcaacgcaattaatgtgagttagctcactcattaggcaccccaggctttacactttatgcttccggctcgtatgttgtgtggaattgtgagcggataacaatttcacacaggaaacagctatgaccatgattacgccaagcgcgcaattaaccctcactaaagggaacaaaagctggagctccaccgcggggcgcgccgcagctagattaaccctagaaagatagtctgcgtaaaattgacgcatgcattcttgaaatattgctctctctttctaaatagcgcgaatccgtcgctgtgcatttaggacatctcagtcgccgcttggagctcccgtgaggcgtgcttgtcaatgcggtaagtgtcactgattttgaactataacaaccgcgtgagtcaaaatgacgcatgattatcttttacgtgacttttaagatttaactcatacgataattatattgttatttcgtgttctacttacgtgataacttattatatatatattttcttgttatagatgggaattcagacatgataagatacattgatgagtttggacaaaccacaactagaatgcagtgaaaaaaatgctttatttgtgaaatttgtgatgctattgctttatttgtaaccattataagctgcaataaacaagtttcgaggtcgagtgtcagtcctgctcctcggccacgaagtcgttacataacttacggtaaatggcccgcctggctgaccgcccaacgacccccgcccattgacgtcaataatgacgtatgttcccatagtaacgccaatagggactttccattgacgtcaatgggtggagtatttacggtaaactgcccacttggcagtacatcaagtgtatcatatgccaagtacgccccctattgacgtcaatgacggtaaatggcccgcctggcattatgcccagtacatgaccttatgggactttcctacttggcagtacatctacgtattagtcatcgctattaccatggtcgaggtgagccccacgttctgcttcactctccccatctcccccccctccccacccccaattttgtatttatttattttttaattattttgtgcagcgatgggggcggggggggggggggggcgcgcgccaggcggggcggggcggggcgaggggcggggcggggcgaggcggagaggtgcggcggcagccaatcagagcggcgcgctccgaaagtttccttttatggcgaggcggcggcggcggcggccctataaaaagcgaagcgcgcggcgggcggggagtcgctgcgacgctgccttcgccccgtgccccgctccgccgccgcctcgcgccgcccgccccggctctgactgaccgcgttactcccacaggtgagcgggcgggacggcccttctcctccgggctgtaattagcgcttggtttaatgacggcttgtttcttttctgtggctgcgtgaaagccttgaggggctccgggagggccctttgtgcggggggagcggctcggggggtgcgtgcgtgtgtgtgtgcgtggggagcgccgcgtgcggctccgcgctgcccggcggctgtgagcgctgcgggcgcggcgcggggctttgtgcgctccgcagtgtgcgcgaggggagcgcggccgggggcggtgccccgcggtgcggggggggctgcgaggggaacaaaggctgcgtgcggggtgtgtgcgtgggggggtgagcagggggtgtgggcgcgtcggtcgggctgcaaccccccctgcacccccctccccgagttgctgagcacggcccggcttcgggtgcggggctccgtacggggcgtggcgcggggctcgccgtgccgggcggggggtggcggcaggtgggggtgccgggcggggcggggccgcctcgggccggggagggctcgggggaggggcgcggcggcccccggagcgccggcggctgtcgaggcgcggcgagccgcagccattgccttttatggtaatcgtgcgagagggcgcagggacttcctttgtcccaaatctgtgcggagccgaaatctgggaggcgccgccgcaccccctctagcgggcgcggggcgaagcggtgcggcgccggcaggaaggaaatgggcggggagggccttcgtgcgtcgccgcgccgccgtccccttctccctctccagcctcggggctgtccgcggggggacggctgccttcgggggggacggggcagggcggggttcggcttctggcgtgtgaccggcggctctagagcctctgctaaccatgttcatgccttcttctttttcctacaggcacctgtgattgcctcgggagttgaaatacacccagattgaattcgatgccaccatgaccgagtacaagcccacggtgcgcctcgccacccgcgacgacgtccccagggccgtacgcaccctcgccgccgcgttcgccgactaccccgccacgcgccacaccgtcgatccggaccgccacatcgagcgggtcaccgagctgcaagaactcttcctcacgcgcgtcgggctcgacatcggcaaggtgtgggtcgcggacgacggcgccgcggtggcggtctggaccacgccggagagcgtcgaagcgggggcggtgttcgccgagatcggcccgcgcatggccgagttgagcggttcccggctggccgcgcagcaacagatggaaggcctcctggcgccgcaccggcccaaggagcccgcgtggttcctggccaccgtcggcgtctcgcccgaccaccagggcaagggtctgggcagcgccgtcgtgctccccggagtggaggcggccgagcgcgccggggtgcccgccttcctggagacctccgcgccccgcaacctccccttctacgagcggctcggcttcaccgtcaccgccgacgtcgaggtgcccgaaggaccgcgcacctggtgcatgacccgcaagcccggtgccggcggcgggtccggaggagagggcagaggaagtctcctaacatgcggtgacgtggaggagaatcctggcccaatggtgagcaagggcgaggaggataacatggccatcatcaaggagttcatgcgcttcaaggtgcacatggagggctccgtgaacggccacgagttcgagatcgagggcgagggcgagggccgcccctacgagggcacccagaccgccaagctgaaggtgaccaagggtggccccctgcccttcgcctgggacatcctgtcccctcagttcatgtacggctccaaggcctacgtgaagcaccccgccgacatccccgactacttgaagctgtccttccccgagggcttcaagtgggagcgcgtgatgaacttcgaggacggcggcgtggtgaccgtgacccaggactcctccctgcaggacggcgagttcatctacaaggtgaagctgcgcggcaccaacttcccctccgacggccccgtaatgcagaagaagaccatgggctgggaggcctcctccgagcggatgtaccccgaggacggcgccctgaagggcgagatcaagcagaggctgaagctgaaggacggcggccactacgacgctgaggtcaagaccacctacaaggccaagaagcccgtgcagctgcccggcgcctacaacgtcaacatcaagttggacatcacctcccacaacgaggactacaccatcgtggaacagtacgaacgcgccgagggccgccactccaccggcggcatggacgagctgtacaagtaaatcaagcttttaccaatagtcggcggttatcagcggaccctacgaagttgcggccgcgattaaaaaacctcccacacctccccctgaacctgaaacataaaatgaatgcaattgttgttgttaacttgtttattgcagcttataatggttacaaataaagcaatagcatcacaaatttcacaaataaagcatttttttcactgcattctagttgtggtttgtccaaactcatcaatgtatcttaaggaattcgataaaagttttgttactttatagaagaaattttgagtttttgtttttttttaataaataaataaacataaataaattgtttgttgaatttattattagtatgtaagtgtaaatataataaaacttaatatctattcaaattaataaataaacctcgatatacagaccgataaaacacatgcgtcaattttacgcatgattatctttaacgtacgtcacaatatgattatctttctagggttaatctagctgcggcgcgccggtacccaattcgccctatagtgagtcgtattacgcgcgctcactggccgtcgttttacaacgtcgtgactgggaaaaccctggcgttacccaacttaatcgccttgcagcacatccccctttcgccagctggcgtaatagcgaagaggcccgcaccgatcgcccttcccaacagttgcgcagcctgaatggcgaatgggacgcgccctgtagcggcgcattaagcgcggcgggtgtggtggttacgcgcagcgtgaccgctacacttgccagcgccctagcgcccgctcctttcgctttcttcccttcctttctcgccacgttcgccggctttccccgtcaagctctaaatcgggggctccctttagggttccgatttagtgctttacggcacctcgaccccaaaaaacttgattagggtgatggttcacgtagtgggccatcgccctgatagacggtttttcgccctttgacgttggagtccacgttctttaatagtggactcttgttccaaactggaacaacactcaaccctatctcggtctattcttttgatttataagggattttgccgatttcggcctattggttaaaaaatgagctgatttaacaaaaatttaacgcgaattttaacaaaatattaacgcttacaatttaggtggcacttttcggggaaatgtgcgcggaacccctatttgtttatttttctaaatacattcaaatatgtatccgctcatgagacaataaccctgataaatgcttcaataatattgaaaaaggaagagtatgagtattcaacatttccgtgtcgcccttattcccttttttgcggcattttgccttcctgtttttgctcacccagaaacgctggtgaaagtaaaagatgctgaagatcagttgggtgcacgagtgggttacatcgaactggatctcaacagcggtaagatccttgagagttttcgccccgaagaacgttttccaatgatgagcacttttaaagttctgctatgtggcgcggtattatcccgtattgacgccgggcaagagcaactcggtcgccgcatacactattctcagaatgacttggttgagtactcaccagtcacagaaaagcatcttacggatggcatgacagtaagagaattatgcagtgctgccataaccatgagtgataacactgcggccaacttacttctgacaacgatcggaggaccgaaggagctaaccgcttttttgcacaacatgggggatcatgtaactcgccttgatcgttgggaaccggagctgaatgaagccataccaaacgacgagcgtgacaccacgatgcctgtagcaatggcaacaacgttgcgcaaactattaactggcgaactacttactctagcttcccggcaacaattaatagactggatggaggcggataaagttgcaggaccacttctgcgctcggcccttccggctggctggtttattgctgataaatctggagccggtgagcgtgggtctcgcggtatcattgcagcactggggccagatggtaagccctcccgtatcgtagttatctacacgacggggagtcaggcaactatggatgaacgaaatagacagatcgctgagataggtgcctcactgattaagcattggtaactgtcagaccaagtttactcatatatactttagattgatttaaaacttcatttttaatttaaaaggatctaggtgaagatcctttttgataatctcatgaccaaaatcccttaacgtgagttttcgttccactgagcgtcagaccccgtagaaa

SEQ ID NO: 89 - DNA, 7122 bp, synthetic construct
  source 1..7122: mol_type = other DNA
agatcaaaggatcttcttgagatcctttttttctgcgcgtaatctgctgcttgcaaacaaaaaaaccaccgctaccagcggtggtttgtttgccggatcaagagctaccaactctttttccgaaggtaactggcttcagcagagcgcagataccaaatactgtccttctagtgtagccgtagttaggccaccacttcaagaactctgtagcaccgcctacatacctcgctctgctaatcctgttaccagtggctgctgccagtggcgataagtcgtgtcttaccgggttggactcaagacgatagttaccggataaggcgcagcggtcgggctgaacggggggttcgtgcacacagcccagcttggagcgaacgacctacaccgaactgagatacctacagcgtgagctatgagaaagcgccacgcttcccgaagggagaaaggcggacaggtatccggtaagcggcagggtcggaacaggagagcgcacgagggagcttccagggggaaacgcctggtatctttatagtcctgtcgggtttcgccacctctgacttgagcgtcgatttttgtgatgctcgtcaggggggcggagcctatggaaaaacgccagcaacgcggcctttttacggttcctggccttttgctggccttttgctcacatgttctttcctgcgttatcccctgattctgtggataaccgtattaccgcctttgagtgagctgataccgctcgccgcagccgaacgaccgagcgcagcgagtcagtgagcgaggaagcggaagagcgcccaatacgcaaaccgcctctccccgcgcgttggccgattcattaatgcagctggcacgacaggtttcccgactggaaagcgggcagtgagcgcaacgcaattaatgtgagttagctcactcattaggcaccccaggctttacactttatgcttccggctcgtatgttgtgtggaattgtgagcggataacaatttcacacaggaaacagctatgaccatgattacgccaagcgcgcaattaaccctcactaaagggaacaaaagctggagctccaccgcggggcgcgccgcagctagattaaccctagaaagatagtctgcgtaaaattgacgcatgcattcttgaaatattgctctctctttctaaatagcgcgaatccgtcgctgtgcatttaggacatctcagtcgccgcttggagctcccgtgaggcgtgcttgtcaatgcggtaagtgtcactgattttgaactataacaaccgcgtgagtcaaaatgacgcatgattatcttttacgtgacttttaagatttaactcatacgataattatattgttatttcgtgttctacttacgtgataacttattatatatatattttcttgttatagatgggaattcagacatgataagatacattgatgagtttggacaaaccacaactagaatgcagtgaaaaaaatgctttatttgtgaaatttgtgatgctattgctttatttgtaaccattataagctgcaataaacaagtttcgaggtcgagtgtcagtcctgctcctcggccacgaagtcgttacataacttacggtaaatggcccgcctggctgaccgcccaacgacccccgcccattgacgtcaataatgacgtatgttcccatagtaacgccaatagggactttccattgacgtcaatgggtggagtatttacggtaaactgcccacttggcagtacatcaagtgtatcatatgccaagtacgccccctattgacgtcaatgacggtaaatggcccgcctggcattatgcccagtacatgaccttatgggactttcctacttggcagtacatctacgtattagtcatcgctattaccatggtcgaggtgagccccacgttctgcttcactctccccatctcccccccctccccacccccaattttgtatttatttattttttaattattttgtgcagcgatgggggcggggggggggggggggcgcgcgccaggcggggcggggcggggcgaggggcggggcggggcgaggcggagaggtgcggcggcagccaatcagagcggcgcgctccgaaagtttccttttatggcgaggcggcggcggcggcggccctataaaaagcgaagcgcgcggcgggcggggagtcgctgcgacgctgccttcgccccgtgccccgctccgccgccgcctcgcgccgcccgccccggctctgactgaccgcgttactcccacaggtgagcgggcgggacggcccttctcctccgggctgtaattagcgcttggtttaatgacggcttgtttcttttctgtggctgcgtgaaagccttgaggggctccgggagggccctttgtgcggggggagcggctcggggggtgcgtgcgtgtgtgtgtgcgtggggagcgccgcgtgcggctccgcgctgcccggcggctgtgagcgctgcgggcgcggcgcggggctttgtgcgctccgcagtgtgcgcgaggggagcgcggccgggggcggtgccccgcggtgcggggggggctgcgaggggaacaaaggctgcgtgcggggtgtgtgcgtgggggggtgagcagggggtgtgggcgcgtcggtcgggctgcaaccccccctgcacccccctccccgagttgctgagcacggcccggcttcgggtgcggggctccgtacggggcgtggcgcggggctcgccgtgccgggcggggggtggcggcaggtgggggtgccgggcggggcggggccgcctcgggccggggagggctcgggggaggggcgcggcggcccccggagcgccggcggctgtcgaggcgcggcgagccgcagccattgccttttatggtaatcgtgcgagagggcgcagggacttcctttgtcccaaatctgtgcggagccgaaatctgggaggcgccgccgcaccccctctagcgggcgcggggcgaagcggtgcggcgccggcaggaaggaaatgggcggggagggccttcgtgcgtcgccgcgccgccgtccccttctccctctccagcctcggggctgtccgcggggggacggctgccttcgggggggacggggcagggcggggttcggcttctggcgtgtgaccggcggctctagagcctctgctaaccatgttcatgccttcttctttttcctacaggcacctgtgattgcctcgggagttgaaatacacccagattgaattcgatgccaccatgaccgagtacaagcccacggtgcgcctcgccacccgcgacgacgtccccagggccgtacgcaccctcgccgccgcgttcgccgactaccccgccacgcgccacaccgtcgatccggaccgccacatcgagcgggtcaccgagctgcaagaactcttcctcacgcgcgtcgggctcgacatcggcaaggtgtgggtcgcggacgacggcgccgcggtggcggtctggaccacgccggagagcgtcgaagcgggggcggtgttcgccgagatcggcccgcgcatggccgagttgagcggttcccggctggccgcgcagcaacagatggaaggcctcctggcgccgcaccggcccaaggagcccgcgtggttcctggccaccgtcggcgtctcgcccgaccaccagggcaagggtctgggcagcgccgtcgtgctccccggagtggaggcggccgagcgcgccggggtgcccgccttcctggagacctccgcgccccgcaacctccccttctacgagcggctcggcttcaccgtcaccgccgacgtcgaggtgcccgaaggaccgcgcacctggtgcatgacccgcaagcccggtgccggcggcgggtccggaggagagggcagaggaagtctcctaacatgcggtgacgtggaggagaatcctggcccaatggtagagatgctgccaactgtcgctgtgctggtcttggcagtgtccgtggttgccaaggataacaccacgctgcaggaattcgccaccatggtgagcaagggcgaggaggataacatggccatcatcaaggagttcatgcgcttcaaggtgcacatggagggctccgtgaacggccacgagttcgagatcgagggcgagggcgagggccgcccctacgagggcacccagaccgccaagctgaaggtgaccaagggtggccccctgcccttcgcctgggacatcctgtcccctcagttcatgtacggctccaaggcctacgtgaagcaccccgccgacatccccgactacttgaagctgtccttccccgagggcttcaagtgggagcgcgtgatgaacttcgaggacggcggcgtggtgaccgtgacccaggactcctccctgcaggacggcgagttcatctacaaggtgaagctgcgcggcaccaacttcccctccgacggccccgtaatgcagaagaagaccatgggctgggaggcctcctccgagcggatgtaccccgaggacggcgccctgaagggcgagatcaagcagaggctgaagctgaaggacggcggccactacgacgctgaggtcaagaccacctacaaggccaagaagcccgtgcagctgcccggcgcctacaacgtcaacatcaagttggacatcacctcccacaacgaggactacaccatcgtggaacagtacgaacgcgccgagggccgccactccaccggcggcatggacgagctgtacaagcaactcgagaatggcggcataagcctgctggttcagaacacatcctggatgctgctgctgctgctttccctctccctcctccaagccctggacttcatttctctgtaaatcaagcttttaccaatagtcggcggttatcagcggaccctacgaagttgcggccgcgattaaaaaacctcccacacctccccctgaacctgaaacataaaatgaatgcaattgttgttgttaacttgtttattgcagcttataatggttacaaataaagcaatagcatcacaaatttcacaaataaagcatttttttcactgcattctagttgtggtttgtccaaactcatcaatgtatcttaaggaattcgataaaagttttgttactttatagaagaaattttgagtttttgtttttttttaataaataaataaacataaataaattgtttgttgaatttattattagtatgtaagtgtaaatataataaaacttaatatctattcaaattaataaataaacctcgatatacagaccgataaaacacatgcgtcaattttacgcatgattatctttaacgtacgtcacaatatgattatctttctagggttaatctagctgcggcgcgccggtacccaattcgccctatagtgagtcgtattacgcgcgctcactggccgtcgttttacaacgtcgtgactgggaaaaccctggcgttacccaacttaatcgccttgcagcacatccccctttcgccagctggcgtaatagcgaagaggcccgcaccgatcgcccttcccaacagttgcgcagcctgaatggcgaatgggacgcgccctgtagcggcgcattaagcgcggcgggtgtggtggttacgcgcagcgtgaccgctacacttgccagcgccctagcgcccgctcctttcgctttcttcccttcctttctcgccacgttcgccggctttccccgtcaagctctaaatcgggggctccctttagggttccgatttagtgctttacggcacctcgaccccaaaaaacttgattagggtgatggttcacgtagtgggccatcgccctgatagacggtttttcgccctttgacgttggagtccacgttctttaatagtggactcttgttccaaactggaacaacactcaaccctatctcggtctattcttttgatttataagggattttgccgatttcggcctattggttaaaaaatgagctgatttaacaaaaatttaacgcgaattttaacaaaatattaacgcttacaatttaggtggcacttttcggggaaatgtgcgcggaacccctatttgtttatttttctaaatacattcaaatatgtatccgctcatgagacaataaccctgataaatgcttcaataatattgaaaaaggaagagtatgagtattcaacatttccgtgtcgcccttattcccttttttgcggcattttgccttcctgtttttgctcacccagaaacgctggtgaaagtaaaagatgctgaagatcagttgggtgcacgagtgggttacatcgaactggatctcaacagcggtaagatccttgagagttttcgccccgaagaacgttttccaatgatgagcacttttaaagttctgctatgtggcgcggtattatcccgtattgacgccgggcaagagcaactcggtcgccgcatacactattctcagaatgacttggttgagtactcaccagtcacagaaaagcatcttacggatggcatgacagtaagagaattatgcagtgctgccataaccatgagtgataacactgcggccaacttacttctgacaacgatcggaggaccgaaggagctaaccgcttttttgcacaacatgggggatcatgtaactcgccttgatcgttgggaaccggagctgaatgaagccataccaaacgacgagcgtgacaccacgatgcctgtagcaatggcaacaacgttgcgcaaactattaactggcgaactacttactctagcttcccggcaacaattaatagactggatggaggcggataaagttgcaggaccacttctgcgctcggcccttccggctggctggtttattgctgataaatctggagccggtgagcgtgggtctcgcggtatcattgcagcactggggccagatggtaagccctcccgtatcgtagttatctacacgacggggagtcaggcaactatggatgaacgaaatagacagatcgctgagataggtgcctcactgattaagcattggtaactgtcagaccaagtttactcatatatactttagattgatttaaaacttcatttttaatttaaaaggatctaggtgaagatcctttttgataatctcatgaccaaaatcccttaacgtgagttttcgttccactgagcgtcagaccccgtagaaa

SEQ ID NO: 90 - DNA, 7569 bp, synthetic construct
  source 1..7569: mol_type = other DNA
agatcaaaggatcttcttgagatcctttttttctgcgcgtaatctgctgcttgcaaacaaaaaaaccaccgctaccagcggtggtttgtttgccggatcaagagctaccaactctttttccgaaggtaactggcttcagcagagcgcagataccaaatactgtccttctagtgtagccgtagttaggccaccacttcaagaactctgtagcaccgcctacatacctcgctctgctaatcctgttaccagtggctgctgccagtggcgataagtcgtgtcttaccgggttggactcaagacgatagttaccggataaggcgcagcggtcgggctgaacggggggttcgtgcacacagcccagcttggagcgaacgacctacaccgaactgagatacctacagcgtgagctatgagaaagcgccacgcttcccgaagggagaaaggcggacaggtatccggtaagcggcagggtcggaacaggagagcgcacgagggagcttccagggggaaacgcctggtatctttatagtcctgtcgggtttcgccacctctgacttgagcgtcgatttttgtgatgctcgtcaggggggcggagcctatggaaaaacgccagcaacgcggcctttttacggttcctggccttttgctggccttttgctcacatgttctttcctgcgttatcccctgattctgtggataaccgtattaccgcctttgagtgagctgataccgctcgccgcagccgaacgaccgagcgcagcgagtcagtgagcgaggaagcggaagagcgcccaatacgcaaaccgcctctccccgcgcgttggccgattcattaatgcagctggcacgacaggtttcccgactggaaagcgggcagtgagcgcaacgcaattaatgtgagttagctcactcattaggcaccccaggctttacactttatgcttccggctcgtatgttgtgtggaattgtgagcggataacaatttcacacaggaaacagctatgaccatgattacgccaagcgcgcaattaaccctcactaaagggaacaaaagctggagctccaccgcggggcgcgccgcagctagattaaccctagaaagatagtctgcgtaaaattgacgcatgcattcttgaaatattgctctctctttctaaatagcgcgaatccgtcgctgtgcatttaggacatctcagtcgccgcttggagctcccgtgaggcgtgcttgtcaatgcggtaagtgtcactgattttgaactataacaaccgcgtgagtcaaaatgacgcatgattatcttttacgtgacttttaagatttaactcatacgataattatattgttatttcgtgttctacttacgtgataacttattatatatatattttcttgttatagatgggaattcagacatgataagatacattgatgagtttggacaaaccacaactagaatgcagtgaaaaaaatgctttatttgtgaaatttgtgatgctattgctttatttgtaaccattataagctgcaataaacaagtttcgaggtcgagtgtcagtcctgctcctcggccacgaagtcgttacataacttacggtaaatggcccgcctggctgaccgcccaacgacccccgcccattgacgtcaataatgacgtatgttcccatagtaacgccaatagggactttccattgacgtcaatgggtggagtatttacggtaaactgcccacttggcagtacatcaagtgtatcatatgccaagtacgccccctattgacgtcaatgacggtaaatggcccgcctggcattatgcccagtacatgaccttatgggactttcctacttggcagtacatctacgtattagtcatcgctattaccatggtcgaggtgagccccacgttctgcttcactctccccatctcccccccctccccacccccaattttgtatttatttattttttaattattttgtgcagcgatgggggcggggggggggggggggcgcgcgccaggcggggcggggcggggcgaggggcggggcggggcgaggcggagaggtgcggcggcagccaatcagagcggcgcgctccgaaagtttccttttatggcgaggcggcggcggcggcggccctataaaaagcgaagcgcgcggcgggcggggagtcgctgcgacgctgccttcgccccgtgccccgctccgccgccgcctcgcgccgcccgccccggctctgactgaccgcgttactcccacaggtgagcgggcgggacggcccttctcctccgggctgtaattagcgcttggtttaatgacggcttgtttcttttctgtggctgcgtgaaagccttgaggggctccgggagggccctttgtgcggggggagcggctcggggggtgcgtgcgtgtgtgtgtgcgtggggagcgccgcgtgcggctccgcgctgcccggcggctgtgagcgctgcgggcgcggcgcggggctttgtgcgctccgcagtgtgcgcgaggggagcgcggccgggggcggtgccccgcggtgcggggggggctgcgaggggaacaaaggctgcgtgcggggtgtgtgcgtgggggggtgagcagggggtgtgggcgcgtcggtcgggctgcaaccccccctgcacccccctccccgagttgctgagcacggcccggcttcgggtgcggggctccgtacggggcgtggcgcggggctcgccgtgccgggcggggggtggcggcaggtgggggtgccgggcggggcggggccgcctcgggccggggagggctcgggggaggggcgcggcggcccccggagcgccggcggctgtcgaggcgcggcgagccgcagccattgccttttatggtaatcgtgcgagagggcgcagggacttcctttgtcccaaatctgtgcggagccgaaatctgggaggcgccgccgcaccccctctagcgggcgcggggcgaagcggtgcggcgccggcaggaaggaaatgggcggggagggccttcgtgcgtcgccgcgccgccgtccccttctccctctccagcctcggggctgtccgcggggggacggctgccttcgggggggacggggcagggcggggttcggcttctggcgtgtgaccggcggctctagagcctctgctaaccatgttcatgccttcttctttttcctacaggcacctgtgattgcctcgggagttgaaatacacccagattgccaccatgaccgagtacaagcccacggtgcgcctcgccacccgcgacgacgtccccagggccgtacgcaccctcgccgccgcgttcgccgactaccccgccacgcgccacaccgtcgatccggaccgccacatcgagcgggtcaccgagctgcaagaactcttcctcacgcgcgtcgggctcgacatcggcaaggtgtgggtcgcggacgacggcgccgcggtggcggtctggaccacgccggagagcgtcgaagcgggggcggtgttcgccgagatcggcccgcgcatggccgagttgagcggttcccggctggccgcgcagcaacagatggaaggcctcctggcgccgcaccggcccaaggagcccgcgtggttcctggccaccgtcggcgtctcgcccgaccaccagggcaagggtctgggcagcgccgtcgtgctccccggagtggaggcggccgagcgcgccggggtgcccgccttcctggagacctccgcgccccgcaacctccccttctacgagcggctcggcttcaccgtcaccgccgacgtcgaggtgcccgaaggaccgcgcacctggtgcatgacccgcaagcccggtgccggcggcgggtccggaggagagggcagaggaagtctcctaacatgcggtgacgtggaggagaatcctggcccaatgaatttacaaccaattttctggattggactgatcagttcagtttgctgtgtgtttgctatggtgagcaagggcgaggaggataacatggccatcatcaaggagttcatgcgcttcaaggtgcacatggagggctccgtgaacggccacgagttcgagatcgagggcgagggcgagggccgcccctacgagggcacccagaccgccaagctgaaggtgaccaagggtggccccctgcccttcgcctgggacatcctgtcccctcagttcatgtacggctccaaggcctacgtgaagcaccccgccgacatccccgactacttgaagctgtccttccccgagggcttcaagtgggagcgcgtgatgaacttcgaggacggcggcgtggtgaccgtgacccaggactcctccctgcaggacggcgagttcatctacaaggtgaagctgcgcggcaccaacttcccctccgacggccccgtaatgcagaagaagaccatgggctgggaggcctcctccgagcggatgtaccccgaggacggcgccctgaagggcgagatcaagcagaggctgaagctgaaggacggcggccactacgacgctgaggtcaagaccacctacaaggccaagaagcccgtgcagctgcccggcgcctacaacgtcaacatcaagttggacatcacctcccacaacgaggactacaccatcgtggaacagtacgaacgcgccgagggccgccactccaccggcggcatggacgagctgtacaagcaggttcaactggtggaaagcggcggtgctctggtacaaccgggcggtagtctgcgcctgagctgtgccgcaagcggtttcccagtcaaccgctactctatgcgttggtatcgccaggcgcctggtaaagaacgtgaatgggttgccggcatgagcagtgcgggcgatcgttctagttacgaggactctgttaaaggtcgttttacaattagccgtgatgatgcgcgcaataccgtgtatctgcaaatgaacagtctgaagccggaggacaccgcagtatattattgcaatgtcaacgtggggtttgaatattggggccaggggactcaggtgacggtgagctctcaactcgagaatgtggagaatccagagtgtcccactggtccagacatcattccaattgtagctggtgtggttgctggaattgttcttattggccttgcattactgctgatatggaagcttttaatgataattcatgacagaagggagtttgctaaatttgaaaaggagaaaatgaatgccaaatgggacacgggtgaaaatcctatttataagagtgccgtaacaactgtggtcaatccgaagtatgagggaaaatgattaccaatagtcggcggttatcagcggaccctacgaagttgcggccgcgattaaaaaacctcccacacctccccctgaacctgaaacataaaatgaatgcaattgttgttgttaacttgtttattgcagcttataatggttacaaataaagcaatagcatcacaaatttcacaaataaagcatttttttcactgcattctagttgtggtttgtccaaactcatcaatgtatcttaaggaattcgataaaagttttgttactttatagaagaaattttgagtttttgtttttttttaataaataaataaacataaataaattgtttgttgaatttattattagtatgtaagtgtaaatataataaaacttaatatctattcaaattaataaataaacctcgatatacagaccgataaaacacatgcgtcaattttacgcatgattatctttaacgtacgtcacaatatgattatctttctagggttaatctagctgcggcgcgccggtacccaattcgccctatagtgagtcgtattacgcgcgctcactggccgtcgttttacaacgtcgtgactgggaaaaccctggcgttacccaacttaatcgccttgcagcacatccccctttcgccagctggcgtaatagcgaagaggcccgcaccgatcgcccttcccaacagttgcgcagcctgaatggcgaatgggacgcgccctgtagcggcgcattaagcgcggcgggtgtggtggttacgcgcagcgtgaccgctacacttgccagcgccctagcgcccgctcctttcgctttcttcccttcctttctcgccacgttcgccggctttccccgtcaagctctaaatcgggggctccctttagggttccgatttagtgctttacggcacctcgaccccaaaaaacttgattagggtgatggttcacgtagtgggccatcgccctgatagacggtttttcgccctttgacgttggagtccacgttctttaatagtggactcttgttccaaactggaacaacactcaaccctatctcggtctattcttttgatttataagggattttgccgatttcggcctattggttaaaaaatgagctgatttaacaaaaatttaacgcgaattttaacaaaatattaacgcttacaatttaggtggcacttttcggggaaatgtgcgcggaacccctatttgtttatttttctaaatacattcaaatatgtatccgctcatgagacaataaccctgataaatgcttcaataatattgaaaaaggaagagtatgagtattcaacatttccgtgtcgcccttattcccttttttgcggcattttgccttcctgtttttgctcacccagaaacgctggtgaaagtaaaagatgctgaagatcagttgggtgcacgagtgggttacatcgaactggatctcaacagcggtaagatccttgagagttttcgccccgaagaacgttttccaatgatgagcacttttaaagttctgctatgtggcgcggtattatcccgtattgacgccgggcaagagcaactcggtcgccgcatacactattctcagaatgacttggttgagtactcaccagtcacagaaaagcatcttacggatggcatgacagtaagagaattatgcagtgctgccataaccatgagtgataacactgcggccaacttacttctgacaacgatcggaggaccgaaggagctaaccgcttttttgcacaacatgggggatcatgtaactcgccttgatcgttgggaaccggagctgaatgaagccataccaaacgacgagcgtgacaccacgatgcctgtagcaatggcaacaacgttgcgcaaactattaactggcgaactacttactctagcttcccggcaacaattaatagactggatggaggcggataaagttgcaggaccacttctgcgctcggcccttccggctggctggtttattgctgataaatctggagccggtgagcgtgggtctcgcggtatcattgcagcactggggccagatggtaagccctcccgtatcgtagttatctacacgacggggagtcaggcaactatggatgaacgaaatagacagatcgctgagataggtgcctcactgattaagcattggtaactgtcagaccaagtttactcatatatactttagattgatttaaaacttcatttttaatttaaaaggatctaggtgaagatcctttttgataatctcatgaccaaaatcccttaacgtgagttttcgttccactgagcgtcagaccccgtagaaa

SEQ ID NO: 91 - DNA, 7005 bp, synthetic construct
  source 1..7005: mol_type = other DNA
agatcaaaggatcttcttgagatcctttttttctgcgcgtaatctgctgcttgcaaacaaaaaaaccaccgctaccagcggtggtttgtttgccggatcaagagctaccaactctttttccgaaggtaactggcttcagcagagcgcagataccaaatactgtccttctagtgtagccgtagttaggccaccacttcaagaactctgtagcaccgcctacatacctcgctctgctaatcctgttaccagtggctgctgccagtggcgataagtcgtgtcttaccgggttggactcaagacgatagttaccggataaggcgcagcggtcgggctgaacggggggttcgtgcacacagcccagcttggagcgaacgacctacaccgaactgagatacctacagcgtgagctatgagaaagcgccacgcttcccgaagggagaaaggcggacaggtatccggtaagcggcagggtcggaacaggagagcgcacgagggagcttccagggggaaacgcctggtatctttatagtcctgtcgggtttcgccacctctgacttgagcgtcgatttttgtgatgctcgtcaggggggcggagcctatggaaaaacgccagcaacgcggcctttttacggttcctggccttttgctggccttttgctcacatgttctttcctgcgttatcccctgattctgtggataaccgtattaccgcctttgagtgagctgataccgctcgccgcagccgaacgaccgagcgcagcgagtcagtgagcgaggaagcggaagagcgcccaatacgcaaaccgcctctccccgcgcgttggccgattcattaatgcagctggcacgacaggtttcccgactggaaagcgggcagtgagcgcaacgcaattaatgtgagttagctcactcattaggcaccccaggctttacactttatgcttccggctcgtatgttgtgtggaattgtgagcggataacaatttcacacaggaaacagctatgaccatgattacgccaagcgcgcaattaaccctcactaaagggaacaaaagctggagctccaccgcggggcgcgccgcagctagattaaccctagaaagatagtctgcgtaaaattgacgcatgcattcttgaaatattgctctctctttctaaatagcgcgaatccgtcgctgtgcatttaggacatctcagtcgccgcttggagctcccgtgaggcgtgcttgtcaatgcggtaagtgtcactgattttgaactataacaaccgcgtgagtcaaaatgacgcatgattatcttttacgtgacttttaagatttaactcatacgataattatattgttatttcgtgttctacttacgtgataacttattatatatatattttcttgttatagatgggaattcagacatgataagatacattgatgagtttggacaaaccacaactagaatgcagtgaaaaaaatgctttatttgtgaaatttgtgatgctattgctttatttgtaaccattataagctgcaataaacaagtttcgaggtcgagtgtcagtcctgctcctcggccacgaagtcgttacataacttacggtaaatggcccgcctggctgaccgcccaacgacccccgcccattgacgtcaataatgacgtatgttcccatagtaacgccaatagggactttccattgacgtcaatgggtggagtatttacggtaaactgcccacttggcagtacatcaagtgtatcatatgccaagtacgccccctattgacgtcaatgacggtaaatggcccgcctggcattatgcccagtacatgaccttatgggactttcctacttggcagtacatctacgtattagtcatcgctattaccatggtcgaggtgagccccacgttctgcttcactctccccatctcccccccctccccacccccaattttgtatttatttattttttaattattttgtgcagcgatgggggcggggggggggggggggcgcgcgccaggcggggcggggcggggcgaggggcggggcggggcgaggcggagaggtgcggcggcagccaatcagagcggcgcgctccgaaagtttccttttatggcgaggcggcggcggcggcggccctataaaaagcgaagcgcgcggcgggcggggagtcgctgcgacgctgccttcgccccgtgccccgctccgccgccgcctcgcgccgcccgccccggctctgactgaccgcgttactcccacaggtgagcgggcgggacggcccttctcctccgggctgtaattagcgcttggtttaatgacggcttgtttcttttctgtggctgcgtgaaagccttgaggggctccgggagggccctttgtgcggggggagcggctcggggggtgcgtgcgtgtgtgtgtgcgtggggagcgccgcgtgcggctccgcgctgcccggcggctgtgagcgctgcgggcgcggcgcggggctttgtgcgctccgcagtgtgcgcgaggggagcgcggccgggggcggtgccccgcggtgcggggggggctgcgaggggaacaaaggctgcgtgcggggtgtgtgcgtgggggggtgagcagggggtgtgggcgcgtcggtcgggctgcaaccccccctgcacccccctccccgagttgctgagcacggcccggcttcgggtgcggggctccgtacggggcgtggcgcggggctcgccgtgccgggcggggggtggcggcaggtgggggtgccgggcggggcggggccgcctcgggccggggagggctcgggggaggggcgcggcggcccccggagcgccggcggctgtcgaggcgcggcgagccgcagccattgccttttatggtaatcgtgcgagagggcgcagggacttcctttgtcccaaatctgtgcggagccgaaatctgggaggcgccgccgcaccccctctagcgggcgcggggcgaagcggtgcggcgccggcaggaaggaaatgggcggggagggccttcgtgcgtcgccgcgccgccgtccccttctccctctccagcctcggggctgtccgcggggggacggctgccttcgggggggacggggcagggcggggttcggcttctggcgtgtgaccggcggctctagagcctctgctaaccatgttcatgccttcttctttttcctacaggcacctgtgattgcctcgggagttgaaatacacccagattgaattcgatgccaccatgaccgagtacaagcccacggtgcgcctcgccacccgcgacgacgtccccagggccgtacgcaccctcgccgccgcgttcgccgactaccccgccacgcgccacaccgtcgatccggaccgccacatcgagcgggtcaccgagctgcaagaactcttcctcacgcgcgtcgggctcgacatcggcaaggtgtgggtcgcggacgacggcgccgcggtggcggtctggaccacgccggagagcgtcgaagcgggggcggtgttcgccgagatcggcccgcgcatggccgagttgagcggttcccggctggccgcgcagcaacagatggaaggcctcctggcgccgcaccggcccaaggagcccgcgtggttcctggccaccgtcggcgtctcgcccgaccaccagggcaagggtctgggcagcgccgtcgtgctccccggagtggaggcggccgagcgcgccggggtgcccgccttcctggagacctccgcgccccgcaacctccccttctacgagcggctcggcttcaccgtcaccgccgacgtcgaggtgcccgaaggaccgcgcacctggtgcatgacccgcaagcccggtgccggcggcgggtccggaggagagggcagaggaagtctcctaacatgcggtgacgtggaggagaatcctggcccaagatctgatccaaaaaagaagagaaaggtagatccaaaaaagaagagaaaggtagatccaaaaaagaagagaaaggtcatggtgagcaagggcgaggaggataacatggccatcatcaaggagttcatgcgcttcaaggtgcacatggagggctccgtgaacggccacgagttcgagatcgagggcgagggcgagggccgcccctacgagggcacccagaccgccaagctgaaggtgaccaagggtggccccctgcccttcgcctgggacatcctgtcccctcagttcatgtacggctccaaggcctacgtgaagcaccccgccgacatccccgactacttgaagctgtccttccccgagggcttcaagtgggagcgcgtgatgaacttcgaggacggcggcgtggtgaccgtgacccaggactcctccctgcaggacggcgagttcatctacaaggtgaagctgcgcggcaccaacttcccctccgacggccccgtaatgcagaagaagaccatgggctgggaggcctcctccgagcggatgtaccccgaggacggcgccctgaagggcgagatcaagcagaggctgaagctgaaggacggcggccactacgacgctgaggtcaagaccacctacaaggccaagaagcccgtgcagctgcccggcgcctacaacgtcaacatcaagttggacatcacctcccacaacgaggactacaccatcgtggaacagtacgaacgcgccgagggccgccactccaccggcggcatggacgagctgtacaagtaaatcaagcttttaccaatagtcggcggttatcagcggaccctacgaagttgcggccgcgattaaaaaacctcccacacctccccctgaacctgaaacataaaatgaatgcaattgttgttgttaacttgtttattgcagcttataatggttacaaataaagcaatagcatcacaaatttcacaaataaagcatttttttcactgcattctagttgtggtttgtccaaactcatcaatgtatcttaaggaattcgataaaagttttgttactttatagaagaaattttgagtttttgtttttttttaataaataaataaacataaataaattgtttgttgaatttattattagtatgtaagtgtaaatataataaaacttaatatctattcaaattaataaataaacctcgatatacagaccgataaaacacatgcgtcaattttacgcatgattatctttaacgtacgtcacaatatgattatctttctagggttaatctagctgcggcgcgccggtacccaattcgccctatagtgagtcgtattacgcgcgctcactggccgtcgttttacaacgtcgtgactgggaaaaccctggcgttacccaacttaatcgccttgcagcacatccccctttcgccagctggcgtaatagcgaagaggcccgcaccgatcgcccttcccaacagttgcgcagcctgaatggcgaatgggacgcgccctgtagcggcgcattaagcgcggcgggtgtggtggttacgcgcagcgtgaccgctacacttgccagcgccctagcgcccgctcctttcgctttcttcccttcctttctcgccacgttcgccggctttccccgtcaagctctaaatcgggggctccctttagggttccgatttagtgctttacggcacctcgaccccaaaaaacttgattagggtgatggttcacgtagtgggccatcgccctgatagacggtttttcgccctttgacgttggagtccacgttctttaatagtggactcttgttccaaactggaacaacactcaaccctatctcggtctattcttttgatttataagggattttgccgatttcggcctattggttaaaaaatgagctgatttaacaaaaatttaacgcgaattttaacaaaatattaacgcttacaatttaggtggcacttttcggggaaatgtgcgcggaacccctatttgtttatttttctaaatacattcaaatatgtatccgctcatgagacaataaccctgataaatgcttcaataatattgaaaaaggaagagtatgagtattcaacatttccgtgtcgcccttattcccttttttgcggcattttgccttcctgtttttgctcacccagaaacgctggtgaaagtaaaagatgctgaagatcagttgggtgcacgagtgggttacatcgaactggatctcaacagcggtaagatccttgagagttttcgccccgaagaacgttttccaatgatgagcacttttaaagttctgctatgtggcgcggtattatcccgtattgacgccgggcaagagcaactcggtcgccgcatacactattctcagaatgacttggttgagtactcaccagtcacagaaaagcatcttacggatggcatgacagtaagagaattatgcagtgctgccataaccatgagtgataacactgcggccaacttacttctgacaacgatcggaggaccgaaggagctaaccgcttttttgcacaacatgggggatcatgtaactcgccttgatcgttgggaaccggagctgaatgaagccataccaaacgacgagcgtgacaccacgatgcctgtagcaatggcaacaacgttgcgcaaactattaactggcgaactacttactctagcttcccggcaacaattaatagactggatggaggcggataaagttgcaggaccacttctgcgctcggcccttccggctggctggtttattgctgataaatctggagccggtgagcgtgggtctcgcggtatcattgcagcactggggccagatggtaagccctcccgtatcgtagttatctacacgacggggagtcaggcaactatggatgaacgaaatagacagatcgctgagataggtgcctcactgattaagcattggtaactgtcagaccaagtttactcatatatactttagattgatttaaaacttcatttttaatttaaaaggatctaggtgaagatcctttttgataatctcatgaccaaaatcccttaacgtgagttttcgttccactgagcgtcagaccccgtagaaa

SEQ ID NO: 92 - DNA, 7584 bp, synthetic construct
  source 1..7584: mol_type = other DNA
agatcaaaggatcttcttgagatcctttttttctgcgcgtaatctgctgcttgcaaacaaaaaaaccaccgctaccagcggtggtttgtttgccggatcaagagctaccaactctttttccgaaggtaactggcttcagcagagcgcagataccaaatactgtccttctagtgtagccgtagttaggccaccacttcaagaactctgtagcaccgcctacatacctcgctctgctaatcctgttaccagtggctgctgccagtggcgataagtcgtgtcttaccgggttggactcaagacgatagttaccggataaggcgcagcggtcgggctgaacggggggttcgtgcacacagcccagcttggagcgaacgacctacaccgaactgagatacctacagcgtgagctatgagaaagcgccacgcttcccgaagggagaaaggcggacaggtatccggtaagcggcagggtcggaacaggagagcgcacgagggagcttccagggggaaacgcctggtatctttatagtcctgtcgggtttcgccacctctgacttgagcgtcgatttttgtgatgctcgtcaggggggcggagcctatggaaaaacgccagcaacgcggcctttttacggttcctggccttttgctggccttttgctcacatgttctttcctgcgttatcccctgattctgtggataaccgtattaccgcctttgagtgagctgataccgctcgccgcagccgaacgaccgagcgcagcgagtcagtgagcgaggaagcggaagagcgcccaatacgcaaaccgcctctccccgcgcgttggccgattcattaatgcagctggcacgacaggtttcccgactggaaagcgggcagtgagcgcaacgcaattaatgtgagttagctcactcattaggcaccccaggctttacactttatgcttccggctcgtatgttgtgtggaattgtgagcggataacaatttcacacaggaaacagctatgaccatgattacgccaagcgcgcaattaaccctcactaaagggaacaaaagctggagctccaccgcggggcgcgccgcagctagattaaccctagaaagatagtctgcgtaaaattgacgcatgcattcttgaaatattgctctctctttctaaatagcgcgaatccgtcgctgtgcatttaggacatctcagtcgccgcttggagctcccgtgaggcgtgcttgtcaatgcggtaagtgtcactgattttgaactataacaaccgcgtgagtcaaaatgacgcatgattatcttttacgtgacttttaagatttaactcatacgataattatattgttatttcgtgttctacttacgtgataacttattatatatatattttcttgttatagatgggaattcagacatgataagatacattgatgagtttggacaaaccacaactagaatgcagtgaaaaaaatgctttatttgtgaaatttgtgatgctattgctttatttgtaaccattataagctgcaataaacaagtttcgaggtcgagtgtcagtcctgctcctcggccacgaagtcgttacataacttacggtaaatggcccgcctggctgaccgcccaacgacccccgcccattgacgtcaataatgacgtatgttcccatagtaacgccaatagggactttccattgacgtcaatgggtggagtatttacggtaaactgcccacttggcagtacatcaagtgtatcatatgccaagtacgccccctattgacgtcaatgacggtaaatggcccgcctggcattatgcccagtacatgaccttatgggactttcctacttggcagtacatctacgtattagtcatcgctattaccatggtcgaggtgagccccacgttctgcttcactctccccatctcccccccctccccacccccaattttgtatttatttattttttaattattttgtgcagcgatgggggcggggggggggggggggcgcgcgccaggcggggcggggcggggcgaggggcggggcggggcgaggcggagaggtgcggcggcagccaatcagagcggcgcgctccgaaagtttccttttatggcgaggcggcggcggcggcggccctataaaaagcgaagcgcgcggcgggcggggagtcgctgcgacgctgccttcgccccgtgccccgctccgccgccgcctcgcgccgcccgccccggctctgactgaccgcgttactcccacaggtgagcgggcgggacggcccttctcctccgggctgtaattagcgcttggtttaatgacggcttgtttcttttctgtggctgcgtgaaagccttgaggggctccgggagggccctttgtgcggggggagcggctcggggggtgcgtgcgtgtgtgtgtgcgtggggagcgccgcgtgcggctccgcgctgcccggcggctgtgagcgctgcgggcgcggcgcggggctttgtgcgctccgcagtgtgcgcgaggggagcgcggccgggggcggtgccccgcggtgcggggggggctgcgaggggaacaaaggctgcgtgcggggtgtgtgcgtgggggggtgagcagggggtgtgggcgcgtcggtcgggctgcaaccccccctgcacccccctccccgagttgctgagcacggcccggcttcgggtgcggggctccgtacggggcgtggcgcggggctcgccgtgccgggcggggggtggcggcaggtgggggtgccgggcggggcggggccgcctcgggccggggagggctcgggggaggggcgcggcggcccccggagcgccggcggctgtcgaggcgcggcgagccgcagccattgccttttatggtaatcgtgcgagagggcgcagggacttcctttgtcccaaatctgtgcggagccgaaatctgggaggcgccgccgcaccccctctagcgggcgcggggcgaagcggtgcggcgccggcaggaaggaaatgggcggggagggccttcgtgcgtcgccgcgccgccgtccccttctccctctccagcctcggggctgtccgcggggggacggctgccttcgggggggacggggcagggcggggttcggcttctggcgtgtgaccggcggctctagagcctctgctaaccatgttcatgccttcttctttttcctacaggcacctgtgattgcctcgggagttgaaatacacccagattgccaccatgagatctgatccaaaaaagaagagaaaggtagatccaaaaaagaagagaaaggtagatccaaaaaagaagagaaaggtcatggtgagcaagggcgaggaggataacatggccatcatcaaggagttcatgcgcttcaaggtgcacatggagggctccgtgaacggccacgagttcgagatcgagggcgagggcgagggccgcccctacgagggcacccagaccgccaagctgaaggtgaccaagggtggccccctgcccttcgcctgggacatcctgtcccctcagttcatgtacggctccaaggcctacgtgaagcaccccgccgacatccccgactacttgaagctgtccttccccgagggcttcaagtgggagcgcgtgatgaacttcgaggacggcggcgtggtgaccgtgacccaggactcctccctgcaggacggcgagttcatctacaaggtgaagctgcgcggcaccaacttcccctccgacggccccgtaatgcagaagaagaccatgggctgggaggcctcctccgagcggatgtaccccgaggacggcgccctgaagggcgagatcaagcagaggctgaagctgaaggacggcggccactacgacgctgaggtcaagaccacctacaaggccaagaagcccgtgcagctgcccggcgcctacaacgtcaacatcaagttggacatcacctcccacaacgaggactacaccatcgtggaacagtacgaacgcgccgagggccgccactccaccggcggcatggacgagctgtacaaggccacgaacttctctctgttaaagcaagcaggagacgtggaagaaaaccccggtcctatgaccgagtacaagcccacggtgcgcctcgccacccgcgacgacgtccccagggccgtacgcaccctcgccgccgcgttcgccgactaccccgccacgcgccacaccgtcgatccggaccgccacatcgagcgggtcaccgagctgcaagaactcttcctcacgcgcgtcgggctcgacatcggcaaggtgtgggtcgcggacgacggcgccgcggtggcggtctggaccacgccggagagcgtcgaagcgggggcggtgttcgccgagatcggcccgcgcatggccgagttgagcggttcccggctggccgcgcagcaacagatggaaggcctcctggcgccgcaccggcccaaggagcccgcgtggttcctggccaccgtcggagtctcgcccgaccaccagggcaagggtctgggcagcgccgtcgtgctccccggagtggaggcggccgagcgcgccggggtgcccgccttcctggagacctccgcgccccgcaacctccccttctacgagcggctcggcttcaccgtcaccgccgacgtcgaggtgcccgaaggaccgcgcacctggtgcatgacccgcaagcccggtgccgggtccggaggagagggcagaggaagtctcctaacatgcggtgacgtggaggagaatcctggcccaatggtagagatgctgccaactgtcgctgtgctggtcttggcagtgtccgtggttgccaaggataacaccacgctgcaggaattcgccaccatgcaggttcaactggtggaaagcggcggtgctctggtacaaccgggcggtagtctgcgcctgagctgtgccgcaagcggtttcccagtcaaccgctactctatgcgttggtatcgccaggcgcctggtaaagaacgtgaatgggttgccggcatgagcagtgcgggcgatcgttctagttacgaggactctgttaaaggtcgttttacaattagccgtgatgatgcgcgcaataccgtgtatctgcaaatgaacagtctgaagccggaggacaccgcagtatattattgcaatgtcaacgtggggtttgaatattggggccaggggactcaggtgacggtgagctctcaactcgagaatggcggcataagcctgctggttcagaacacatcctggatgctgctgctgctgctttccctctccctcctccaagccctggacttcatttctctgtaattaccaatagtcggcggttatcagcggaccctacgaagttgcggccgcgattaaaaaacctcccacacctccccctgaacctgaaacataaaatgaatgcaattgttgttgttaacttgtttattgcagcttataatggttacaaataaagcaatagcatcacaaatttcacaaataaagcatttttttcactgcattctagttgtggtttgtccaaactcatcaatgtatcttaaggaattcgataaaagttttgttactttatagaagaaattttgagtttttgtttttttttaataaataaataaacataaataaattgtttgttgaatttattattagtatgtaagtgtaaatataataaaacttaatatctattcaaattaataaataaacctcgatatacagaccgataaaacacatgcgtcaattttacgcatgattatctttaacgtacgtcacaatatgattatctttctagggttaatctagctgcggcgcgccggtacccaattcgccctatagtgagtcgtattacgcgcgctcactggccgtcgttttacaacgtcgtgactgggaaaaccctggcgttacccaacttaatcgccttgcagcacatccccctttcgccagctggcgtaatagcgaagaggcccgcaccgatcgcccttcccaacagttgcgcagcctgaatggcgaatgggacgcgccctgtagcggcgcattaagcgcggcgggtgtggtggttacgcgcagcgtgaccgctacacttgccagcgccctagcgcccgctcctttcgctttcttcccttcctttctcgccacgttcgccggctttccccgtcaagctctaaatcgggggctccctttagggttccgatttagtgctttacggcacctcgaccccaaaaaacttgattagggtgatggttcacgtagtgggccatcgccctgatagacggtttttcgccctttgacgttggagtccacgttctttaatagtggactcttgttccaaactggaacaacactcaaccctatctcggtctattcttttgatttataagggattttgccgatttcggcctattggttaaaaaatgagctgatttaacaaaaatttaacgcgaattttaacaaaatattaacgcttacaatttaggtggcacttttcggggaaatgtgcgcggaacccctatttgtttatttttctaaatacattcaaatatgtatccgctcatgagacaataaccctgataaatgcttcaataatattgaaaaaggaagagtatgagtattcaacatttccgtgtcgcccttattcccttttttgcggcattttgccttcctgtttttgctcacccagaaacgctggtgaaagtaaaagatgctgaagatcagttgggtgcacgagtgggttacatcgaactggatctcaacagcggtaagatccttgagagttttcgccccgaagaacgttttccaatgatgagcacttttaaagttctgctatgtggcgcggtattatcccgtattgacgccgggcaagagcaactcggtcgccgcatacactattctcagaatgacttggttgagtactcaccagtcacagaaaagcatcttacggatggcatgacagtaagagaattatgcagtgctgccataaccatgagtgataacactgcggccaacttacttctgacaacgatcggaggaccgaaggagctaaccgcttttttgcacaacatgggggatcatgtaactcgccttgatcgttgggaaccggagctgaatgaagccataccaaacgacgagcgtgacaccacgatgcctgtagcaatggcaacaacgttgcgcaaactattaactggcgaactacttactctagcttcccggcaacaattaatagactggatggaggcggataaagttgcaggaccacttctgcgctcggcccttccggctggctggtttattgctgataaatctggagccggtgagcgtgggtctcgcggtatcattgcagcactggggccagatggtaagccctcccgtatcgtagttatctacacgacggggagtcaggcaactatggatgaacgaaatagacagatcgctgagataggtgcctcactgattaagcattggtaactgtcagaccaagtttactcatatatactttagattgatttaaaacttcatttttaatttaaaaggatctaggtgaagatcctttttgataatctcatgaccaaaatcccttaacgtgagttttcgttccactgagcgtcagaccccgtagaaa

SEQ ID NO: 93 - DNA, 8151 bp, synthetic construct
  source 1..8151: mol_type = other DNA
ccctctagcgggcgcgggcgaagcggtgcggcgccggcaggaaggaaatgggcggggagggccttcgtgcgtcgccgcgccgccgtccccttctccatctccagcctcggggctgccgcagggggacggctgccttcgggggggacggggcagggcggggttcggcttctggcgtgtgaccggcggctctagagcctctgctaaccatgttcatgccttcttctttttcctacagctcctgggcaacgtgctggttattgtgctgtctcatcattttggcaaaggcacctgtgattgcctcgggagttgaaatacacccagattgccaccatggcctctactggtctgcaaatcttggggatcgtcctgaccctgcttggctgggtcaacgccctggtgtcctgtgccctgcccatgtggaaggtgaccgccttcatcggcaacatgcaggttcaactggtggaaagcggcggtgctctggtacaaccgggcggtagtctgcgcctgagctgtgccgcaagcggtttcccagtcaaccgctactctatgcgttggtatcgccaggcgcctggtaaagaacgtgaatgggttgccggcatgagcagtgcgggcgatcgttctagttacgaggactctgttaaaggtcgttttacaattagccgtgatgatgcgcgcaataccgtgtatctgcaaatgaacagtctgaagccggaggacaccgcagtatattattgcaatgtcaacgtggggtttgaatattggggccaggggactcaggtgacggtgagctctgccacgaacttctctctgttaaagcaagcaggagacgtggaagaaaaccccggtcctatgaccgagtacaagcccacggtgcgcctcgccacccgcgacgacgtccccagggccgtacgcaccctcgccgccgcgttcgccgactaccccgccacgcgccacaccgtcgatccggaccgccacatcgagcgggtcaccgagctgcaagaactcttcctcacgcgcgtcgggctcgacatcggcaaggtgtgggtcgcggacgacggcgccgcggtggcggtctggaccacgccggagagcgtcgaagcgggggcggtgttcgccgagatcggcccgcgcatggccgagttgagcggttcccggctggccgcgcagcaacagatggaaggcctcctggcgccgcaccggcccaaggagcccgcgtggttcctggccaccgtcggagtctcgcccgaccaccagggcaagggtctgggcagcgccgtcgtgctccccggagtggaggcggccgagcgcgccggggtgcccgccttcctggagacctccgcgccccgcaacctccccttctacgagcggctcggcttcaccgtcaccgccgacgtcgaggtgcccgaaggaccgcgcacctggtgcatgacccgcaagcccggtgccggcggcgggtccggaggagagggcagaggaagtctcctaacatgcggtgacgtggaggagaatcctggcccaatggcctctactggtctgcaaatcttggggatcgtcctgaccctgcttggctgggtcaacgccctggtgtcctgtgccctgcccatgtggaaggtgaccgccttcatcggcaacatggtgagcaagggcgaggagctgttcaccggggtggtgcccatcctggtcgagctggacggcgacgtaaacggccacaagttcagcgtgtccggcgagggcgagggcgatgccacctacggcaagctgaccctgaagttcatctgcaccaccggcaagctgcccgtgccctggcccaccctcgtgaccaccctgacctacggcgtgcagtgcttcagccgctaccccgaccacatgaagcagcacgacttcttcaagtccgccatgcccgaaggctacgtccaggagcgcaccatcttcttcaaggacgacggcaactacaagacccgcgccgaggtgaagttcgagggcgacaccctggtgaaccgcatcgagctgaagggcatcgacttcaaggaggacggcaacatcctggggcacaagctggagtacaactacaacagccacaacgtctatatcatggccgacaagcagaagaacggcatcaaggtgaacttcaagatccgccacaacatcgaggacggcagcgtgcagctcgccgaccactaccagcagaacacccccatcggcgacggccccgtgctgctgcccgacaaccactacctgagcacccagtccgccctgagcaaagaccccaacgagaagcgcgatcacatggtcctgctggagttcgtgaccgccgccgggatcactctcggcatggatgaactatactgattaccaatagtcggcggttatcagcggaccctacgaagttggagtaacgaccttgaagacgagtacagagttccggtttgaatcaacctctggattacaaaatttgtgaaagattgactggtattcttaactatgttgctccttttacgctatgtggatacgctgctttaatgcctttgtatcatgctattgcttcccgtatggctttcattttctcctccttgtataaatcctggttgctgtctctttatgaggagttgtggcccgttgtcaggcaacgtggcgtggtgtgcactgtgtttgctgacgcaacccccactggttggggcattgccaccacctgtcagctcctttccgggactttcgctttccccctccctattgccacggcggaactcatcgccgcctgccttgcccgctgctggacaggggctcggctgttgggcactgacaattccgtggtgttgtcctcgagtctagagggcccgtttaaacccgctgatcagcctcgactgtgccttctagttgccagccatctgttgtttgcccctcccccgtgccttccttgaccctggaaggtgccactcccactgtcctttcctaataaaatgaggaaattgcatcgcattgtctgagtaggtgtcattctattctggggggtggggtggggcaggacagcaagggggaggattgggaagacaatagcaggcatgctggggatgcggtgggctctatggctatgagttcgttccctccttgcctcctggtggtagatagttctccaaccgaagtgtttacggaagatagagcccgctgttagccctgagtctgcgttgtaagagcaataggtccactacgcgatcgcgcttttaccacgaacgataataggttggcgggtcactccaaaaagggtcgtgcggcgatactacaatctcctgttactcgtagggataacagggtaatcctgaaaagtggataaccagcaccgttgtgagtgtctcctagacgtcaggtggcacttttcggggaaatgtgcgcggaacccctatttgtttatttttctaaatacattcaaatatgtatccgctcatgagacaataaccctgataaatgcttcaataatattgaaaaaggaagagtatgagtattcaacatttccgtgtcgcccttattcccttttttgcggcattttgccttcctgtttttgctcacccagaaacgctggtgaaagtaaaagatgctgaagatcagttgggtgcacgagtgggttacatcgaactggatctcaacagcggtaagatccttgagagttttcgccccgaagaacgttttccaatgatgagcacttttaaagttctgctatgtggcgcggtattatcccgtgttgacgccgggcaagagcaactcggtcgccgcatacactattctcagaatgacttggttgagtactcaccagtcacagaaaagcatcttacggatggcatgacagtaagagaattatgcagtgctgccataaccatgagtgataacactgcggccaacttacttctgacaacgatcggaggaccgaaggagctaaccgcttttttgcacaacatgggggatcatgtaactcgccttgatcgttgggaaccggagctgaatgaagccataccaaacgacgagcgtgacaccacgatgcctgcagcaatggcaacaacgttgcgcaaactattaactggcgaactacttactctagcttcccggcaacaattaatagactggatggaggcggataaagttgcaggaccacttctgcgctcggcccttccggctggctggtttattgctgataaatctggagccggtgagcgtgggtctcgcggtatcattgcagcactggggccagatggtaagccctcccgtatcgtagttatctacacgacggggagtcaggcaactatggatgaacgaaatagacagatcgctgagataggtgcctcactgattaagcattggtaactgtcagaccaagtttactcatatatactttagacgcagtccctgtcctgagtagtaaacttccgaatagagtgattctgacaccgtgagtaagcacaggtcgggtcttcaatcatcgtctacggattgggacaccgaggtttctgaactcaacatgatcgtgctcctgtcgttgaggacccggctaggctggcggggttgccttactggttagcagaatgaatcaccgatacgcgagcgaacgtgaagcgactgctgctgcaaaacgtctgcgacctgagcaacaacatgaatggtcttcggtttccgtgtttcgtaaagtctggaaacgcggaagtcagcgccctgcaccattatgttccggatctgcatcgcaggatgctgctggctaccctgtggaacacctacatctgtattaacgaagcgctggcattgaccctgagtgatttttctctggtcccgccgcatccataccgccagttgtttaccctcacaacgttccagtaaccgggcatgttcatcatcagtaacccgtatcgtgagcatcctctctcgtttcatcggtatcattacccccatgaacagaaatcccccttacacggaggcatcagtgaccaaacaggaaaaaaccgcccttaacatggcccgctttatcagaagccagacattaacgcttctggagaaactcaacgagctggacgcggatgaacaggcagacatctgtgaatcgcttcacgaccacgctgatgagctttaccgcagctgcctcgcgcgtttcggtgatgacggtgaaaacctctgacacatgcagctcccggagacggtcacagcttgtctgtaagcggatgccgggagcagacaagcccgtcagggcgcgtcagcgggtgttggcgggtgtcggggcgcagccatgacccagtcacgtagcgatagcggagtgtatactggcttaactatgcggcatcagagcagattgtactgagagtgcaccatatgcggtgtgaaataccgcacagatgcgtaaggagaaaataccgcatcaggcgctcttccgcttcctcgctcactgactcgctgcgctcggtcgttcggctgcggcgagcggtatcagctcactcaaaggcggtaatacggttatccacagaatcaggggataacgcaggaaagaacatgtgagcaaaaggccagcaaaaggccaggaaccgtaaaaaggccgcgttgctggcgtttttccataggctccgcccccctgacgagcatcacaaaaatcgacgctcaagtcagaggtggcgaaacccgacaggactataaagataccaggcgtttccccctggaagctccctcgtgcgctctcctgttccgaccctgccgcttaccggatacctgtccgcctttctcccttcgggaagcgtggcgctttctcatagctcacgctgtaggtatctcagttcggtgtaggtcgttcgctccaagctgggctgtgtgcacgaaccccccgttcagcccgaccgctgcgccttatccggtaactatcgtcttgagtccaacccggtaagacacgacttatcgccactggcagcagccactggtaacaggattagcagagcgaggtatgtaggcggtgctacagagttcttgaagtggtggcctaactacggctacactagaaggacagtatttggtatctgcgctctgctgaagccagttaccttcggaaaaagagttggtagctcttgatccggcaaacaaaccaccgctggtagcggtggtttttttgtttgcaagcagcagattacgcgcagaaaaaaaggatctcaagaagatcctttgatcttttctacggggtctgacgctcagtggaacgaaaactcacgttaagggattttggtcatgagattatcaaaaaggatcttcacctagatccttttaaattaaaaatgaagttttaaatcaagttgcgactgtagagcgttgaccctgacacaatacttacgattaccctgttatccctacgctaccttcggtgaaagtgagtcggcacaatctcgtaatgtgaacactgcttcgccacttattgatagtcgcaacgggagcgatcgctaaaagcagcgattcgtggctcagtcccagagtcgtatctagctagtcaggtagtaaaaggtctcaactaggcagtggcagagcaggattcaaattcagggctgttgtgatgcctccgcagactctgagcgccacctggtggtaatttgtctgtgcctcttctgacgtggaagaacagcaactaacacactaacacggcatttactatgggccagccattgttctaaagccctcgttcacagagaaagttcggttacactgcggatttcgacattgattattgactagttattaatagtaatcaattacggggtcattagttcatagcccatatatggagttccgcgttacataacttacggtaaatggcccgcctggctgaccgcccaacgacccccgcccattgacgtcaataatgacgtatgttcccatagtaacgccaatagggactttccattgacgtcaatgggtggactatttacggtaaactgcccacttggcagtacatcaagtgtatcatatgccaagtacgccccctattgacgtcaatgacggtaaatggcccgcctggcattatgcccagtacatgaccttatgggactttcctacttggcagtacatctacgtattagtcatcgctattaccatgggtcgaggtgagccccacgttctgcttcactctccccatctcccccccctccccacccccaattttgtatttatttattttttaattattttgtgcagcgatgggggcggggggggggggggcgcgcgccaggcggggcggggcggggcgaggggcggggcggggcgaggcggagaggtgcggcggcagccaatcagagcggcgcgctccgaaagtttccttttatggcgaggcggcggcggcggcggccctataaaaagcgaagcgcgcggcgggcgggagtcgctgcgttgccttcgccccgtgccccgctccgcgccgcctcgcgccgcccgccccggctctgactgaccgcgttactcccacaggtgagcgggcgggacggcccttctcctccgggctgtaattagcgcttggtttaatgacggctcgtttcttttctgtggctgcgtgaaagccttaaagggctccgggagggccctttgtgcgggggggagcggctcggggggtgcgtgcgtgtgtgtgtgcgtggggagcgccgcgtgcggcccgcgctgcccggcggctgtgagcgctgcgggcgcggcgcggggctttgtgcgctccgcgtgtgcgcgaggggagcgcggccgggggcggtgccccgcggtgcgggggggctgcgaggggaacaaaggctgcgtgcggggtgtgtgcgtgggggggtgagcagggggtgtgggcgcggcggtcgggctgtaacccccccctgcacccccctccccgagttgctgagcacggcccggcttcgggtgcggggctccgtgcggggcgtggcgcggggctcgccgtgccgggcggggggtggcggcaggtgggggtgccgggcggggcggggccgcctcgggccggggagggctcgggggaggggcgcggcggccccggagcgccggcggctgtcgaggcgcggcgagccgcagccattgccttttatggtaatcgtgcgagagggcgcagggacttcctttgtcccaaatctggcggagccgaaatctgggaggcgccgccgcacc

SEQ ID NO: 94 - DNA, 8596 bp, synthetic construct
  source 1..8596: mol_type = other DNA
attctgacaccgtgagtaagcacaggtcgggtcttcaatcatcgtctacggattgggacaccgaggtttctgaactcaacatgatcgtgctcctgtcgttgaggacccggctaggctggcggggttgccttactggttagcagaatgaatcaccgatacgcgagcgaacgtgaagcgactgctgctgcaaaacgtctgcgacctgagcaacaacatgaatggtcttcggtttccgtgtttcgtaaagtctggaaacgcggaagtcagcgccctgcaccattatgttccggatctgcatcgcaggatgctgctggctaccctgtggaacacctacatctgtattaacgaagcgctggcattgaccctgagtgatttttctctggtcccgccgcatccataccgccagttgtttaccctcacaacgttccagtaaccgggcatgttcatcatcagtaacccgtatcgtgagcatcctctctcgtttcatcggtatcattacccccatgaacagaaatcccccttacacggaggcatcagtgaccaaacaggaaaaaaccgcccttaacatggcccgctttatcagaagccagacattaacgcttctggagaaactcaacgagctggacgcggatgaacaggcagacatctgtgaatcgcttcacgaccacgctgatgagctttaccgcagctgcctcgcgcgtttcggtgatgacggtgaaaacctctgacacatgcagctcccggagacggtcacagcttgtctgtaagcggatgccgggagcagacaagcccgtcagggcgcgtcagcgggtgttggcgggtgtcggggcgcagccatgacccagtcacgtagcgatagcggagtgtatactggcttaactatgcggcatcagagcagattgtactgagagtgcaccatatgcggtgtgaaataccgcacagatgcgtaaggagaaaataccgcatcaggcgctcttccgcttcctcgctcactgactcgctgcgctcggtcgttcggctgcggcgagcggtatcagctcactcaaaggcggtaatacggttatccacagaatcaggggataacgcaggaaagaacatgtgagcaaaaggccagcaaaaggccaggaaccgtaaaaaggccgcgttgctggcgtttttccataggctccgcccccctgacgagcatcacaaaaatcgacgctcaagtcagaggtggcgaaacccgacaggactataaagataccaggcgtttccccctggaagctccctcgtgcgctctcctgttccgaccctgccgcttaccggatacctgtccgcctttctcccttcgggaagcgtggcgctttctcatagctcacgctgtaggtatctcagttcggtgtaggtcgttcgctccaagctgggctgtgtgcacgaaccccccgttcagcccgaccgctgcgccttatccggtaactatcgtcttgagtccaacccggtaagacacgacttatcgccactggcagcagccactggtaacaggattagcagagcgaggtatgtaggcggtgctacagagttcttgaagtggtggcctaactacggctacactagaaggacagtatttggtatctgcgctctgctgaagccagttaccttcggaaaaagagttggtagctcttgatccggcaaacaaaccaccgctggtagcggtggtttttttgtttgcaagcagcagattacgcgcagaaaaaaaggatctcaagaagatcctttgatcttttctacggggtctgacgctcagtggaacgaaaactcacgttaagggattttggtcatgagattatcaaaaaggatcttcacctagatccttttaaattaaaaatgaagttttaaatcaagcgatcgcgtcagttaacggcagccggagtgcgcagccgccggcagcctcgctctgcccactgggtggggcgggaggtaggtggggtgaggcgagctggacgtgcgggcgcggtcggcctctggcggggcgggggaggggagggagggtcagcgaaagtagctcgcgcgcgagcggccgcccaccctccccttcctctgggggagtcgttttacccgccgccggccgggcctcgtcgtctgattggctctcggggcccagaaaactggcccttgccattggctcgtgttcgtgcaagttgagtccatccgccggccagcgggggcggcgaggaggcgctcccaggttccggccctcccctcggctccgcgccgcagagtctggccgcgcgcccctgcgcaacgtggcaggaagcgcgcgctgggggcggggacgggcagtagggctgagcggctgcggggcgggtgcaagcacgtttccgacttgagttgcctcaagaggggcgtgctgagccagacctccatcgcgcactccggggagtggagggaaggagcgagggctcagttgggctgttttggaggcaggaagcacttgctctcccaaagtcgctctgagttgttatcagtaagggagctgcagtggagtaggcggggagaaggccgcacccttctccggaggggggaggggagtgttgcaatacctttctgggagttctctgctgcctcctggcttctgaggaccgccctgggcctgggagaatcccttccccctcttccctcgtgatctgcaactccagtctttctagagatagccctcgttcacagagaaagttcggttacactgcggatttcgacattgattattgactagttattaatagtaatcaattacggggtcattagttcatagcccatatatggagttccgcgttacataacttacggtaaatggcccgcctggctgaccgcccaacgacccccgcccattgacgtcaataatgacgtatgttcccatagtaacgccaatagggactttccattgacgtcaatgggtggactatttacggtaaactgcccacttggcagtacatcaagtgtatcatatgccaagtacgccccctattgacgtcaatgacggtaaatggcccgcctggcattatgcccagtacatgaccttatgggactttcctacttggcagtacatctacgtattagtcatcgctattaccatgggtcgaggtgagccccacgttctgcttcactctccccatctcccccccctccccacccccaattttgtatttatttattttttaattattttgtgcagcgatgggggcggggggggggggggcgcgcgccaggcggggcggggcggggcgaggggcggggcggggcgaggcggagaggtgcggcggcagccaatcagagcggcgcgctccgaaagtttccttttatggcgaggcggcggcggcggcggccctataaaaagcgaagcgcgcggcgggcgggagtcgctgcgttgccttcgccccgtgccccgctccgcgccgcctcgcgccgcccgccccggctctgactgaccgcgttactcccacaggtgagcgggcgggacggcccttctcctccgggctgtaattagcgcttggtttaatgacggctcgtttcttttctgtggctgcgtgaaagccttaaagggctccgggagggccctttgtgcgggggggagcggctcggggggtgcgtgcgtgtgtgtgtgcgtggggagcgccgcgtgcggcccgcgctgcccggcggctgtgagcgctgcgggcgcggcgcggggctttgtgcgctccgcgtgtgcgcgaggggagcgcggccgggggcggtgccccgcggtgcgggggggctgcgaggggaacaaaggctgcgtgcggggtgtgtgcgtgggggggtgagcagggggtgtgggcgcggcggtcgggctgtaacccccccctgcacccccctccccgagttgctgagcacggcccggcttcgggtgcggggctccgtgcggggcgtggcgcggggctcgccgtgccgggcggggggtggcggcaggtgggggtgccgggcggggcggggccgcctcgggccggggagggctcgggggaggggcgcggcggccccggagcgccggcggctgtcgaggcgcggcgagccgcagccattgccttttatggtaatcgtgcgagagggcgcagggacttcctttgtcccaaatctggcggagccgaaatctgggaggcgccgccgcaccccctctagcgggcgcgggcgaagcggtgcggcgccggcaggaaggaaatgggcggggagggccttcgtgcgtcgccgcgccgccgtccccttctccatctccagcctcggggctgccgcagggggacggctgccttcgggggggacggggcagggcggggttcggcttctggcgtgtgaccggcggctctagagcctctgctaaccatgttcatgccttcttctttttcctacagctcctgggcaacgtgctggttattgtgctgtctcatcattttggcaaaggcacctgtgattgcctcgggagttgaaatacacccagattgccaccatggcctcaccgttgacccgctttctgtcgctgaacctgctgctgctgggtgagtcgattatcctggggagtggagaagctactagtatggtgagcaagggcgaggagctgttcaccggggtggtgcccatcctggtcgagctggacggcgacgtaaacggccacaagttcagcgtgtccggcgagggcgagggcgatgccacctacggcaagctgaccctgaagttcatctgcaccaccggcaagctgcccgtgccctggcccaccctcgtgaccaccctgacctacggcgtgcagtgcttcagccgctaccccgaccacatgaagcagcacgacttcttcaagtccgccatgcccgaaggctacgtccaggagcgcaccatcttcttcaaggacgacggcaactacaagacccgcgccgaggtgaagttcgagggcgacaccctggtgaaccgcatcgagctgaagggcatcgacttcaaggaggacggcaacatcctggggcacaagctggagtacaactacaacagccacaacgtctatatcatggccgacaagcagaagaacggcatcaaggtgaacttcaagatccgccacaacatcgaggacggcagcgtgcagctcgccgaccactaccagcagaacacccccatcggcgacggccccgtgctgctgcccgacaaccactacctgagcacccagtccgccctgagcaaagaccccaacgagaagcgcgatcacatggtcctgctggagttcgtgaccgccgccgggatcactctcggcatggatgaactatacaagactagtaagccacaggcacccgaactccgaatctttccaaagaaaatggacgccgaacttggtcagaaggtggacctggtatgtgaagtgttggggtccgtttcgcaaggatgctcttggctcttccagaactccagctccaaactcccccagcccaccttcgttgtctatatggcttcatcccacaacaagataacgtgggacgagaagctgaattcgtcgaaactgttttctgccatgagggacacgaataataagtacgttctcaccctgaacaagttcagcaaggaaaacgaaggctactatttctgctcagtcatcagcaactcggtgatgtacttcagttctgtcgtgccagtccttcagaaagtgaactctactactaccaagccagtgctgcgaactccctcacctgtgcaccctaccgggacatctcagccccagagaccagaagattgtcggccccgtggctcagtgaaggggaccggattggacttcgcctgtgatatttacatctgggcacccttggccggaatctgcgtggcccttctgctgtccttgatcatcactctcatctgctaccacagccgcggatccacctaattaccaatagtcggcggttatcagcggaccctacgaagttggagtaacgaccttgaagacgagtacagagttccggtttgaatcaacctctggattacaaaatttgtgaaagattgactggtattcttaactatgttgctccttttacgctatgtggatacgctgctttaatgcctttgtatcatgctattgcttcccgtatggctttcattttctcctccttgtataaatcctggttgctgtctctttatgaggagttgtggcccgttgtcaggcaacgtggcgtggtgtgcactgtgtttgctgacgcaacccccactggttggggcattgccaccacctgtcagctcctttccgggactttcgctttccccctccctattgccacggcggaactcatcgccgcctgccttgcccgctgctggacaggggctcggctgttgggcactgacaattccgtggtgttgtcctcgagtctagagggcccgtttaaacccgctgatcagcctcgactgtgccttctagttgccagccatctgttgtttgcccctcccccgtgccttccttgaccctggaaggtgccactcccactgtcctttcctaataaaatgaggaaattgcatcgcattgtctgagtaggtgtcattctattctggggggtggggtggggcaggacagcaagggggaggattgggaagacaatagcaggcatgctggggatgcggtgggctctatggctatgagttcgttccctccttgcctcctggtggtagatagttctccaaccgaagtgtttacggaagatagagcccgctgtgggcgggagtcttctgggcaggcttaaaggctaacctggtgtgtgggcgttgtcctgcaggggaattgaacaggtgtaaaattggagggacaagacttcccacagattttcggttttgtcgggaagttttttaataggggcaaataaggaaaatgggaggataggtagtcatctggggttttatgcagcaaaactacaggttattattgcttgtgatccgcctcggagtattttccatcgaggtagattaaagacatgctcacccgagttttatactctcctgcttgagatccttactacagtatgaaattacagtgtcgcgagttagactatgtaagcagaattttaatcatttttaaagagcccagtacttcatatccatttctcccgctccttctgcagccttatcaaaaggtattttagaacactcattttagccccattttcatttattatactggcttatccaacccctagacagagcattggcattttccctttcctgatcttagaagtctgatgactcatgaaaccagacagattagttacatacaccacaaatcgaggctgtagctggggcctcaacactgcagttcttttataactccttagtacactttttgttgatcctttgccttgatccttaattttcagtgtctatcacctctcccgtcaggtggtgttccacatttgggcctattctcagtccagggagttttacaacaatagatgtattgagaatccaacctaaagcttaactttccactcccatgaatgcctctctcctttttctccatttagcgatcgcagacgtcaggtggcacttttcggggaaatgtgcgcggaacccctatttgtttatttttctaaatacattcaaatatgtatccgctcatgagacaataaccctgataaatgcttcaataatattgaaaaaggaagagtatgagtattcaacatttccgtgtcgcccttattcccttttttgcggcattttgccttcctgtttttgctcacccagaaacgctggtgaaagtaaaagatgctgaagatcagttgggtgcacgagtgggttacatcgaactggatctcaacagcggtaagatccttgagagttttcgccccgaagaacgttttccaatgatgagcacttttaaagttctgctatgtggcgcggtattatcccgtgttgacgccgggcaagagcaactcggtcgccgcatacactattctcagaatgacttggttgagtactcaccagtcacagaaaagcatcttacggatggcatgacagtaagagaattatgcagtgctgccataaccatgagtgataacactgcggccaacttacttctgacaacgatcggaggaccgaaggagctaaccgcttttttgcacaacatgggggatcatgtaactcgccttgatcgttgggaaccggagctgaatgaagccataccaaacgacgagcgtgacaccacgatgcctgcagcaatggcaacaacgttgcgcaaactattaactggcgaactacttactctagcttcccggcaacaattaatagactggatggaggcggataaagttgcaggaccacttctgcgctcggcccttccggctggctggtttattgctgataaatctggagccggtgagcgtgggtctcgcggtatcattgcagcactggggccagatggtaagccctcccgtatcgtagttatctacacgacggggagtcaggcaactatggatgaacgaaatagacagatcgctgagataggtgcctcactgattaagcattggtaactgtcagaccaagtttactcatatatactttagacgcagtccctgtcctgagtagtaaacttccgaatagagtg

SEQ ID NO: 95 - DNA, 8843 bp, synthetic construct
  source 1..8843: mol_type = other DNA
attctgacaccgtgagtaagcacaggtcgggtcttcaatcatcgtctacggattgggacaccgaggtttctgaactcaacatgatcgtgctcctgtcgttgaggacccggctaggctggcggggttgccttactggttagcagaatgaatcaccgatacgcgagcgaacgtgaagcgactgctgctgcaaaacgtctgcgacctgagcaacaacatgaatggtcttcggtttccgtgtttcgtaaagtctggaaacgcggaagtcagcgccctgcaccattatgttccggatctgcatcgcaggatgctgctggctaccctgtggaacacctacatctgtattaacgaagcgctggcattgaccctgagtgatttttctctggtcccgccgcatccataccgccagttgtttaccctcacaacgttccagtaaccgggcatgttcatcatcagtaacccgtatcgtgagcatcctctctcgtttcatcggtatcattacccccatgaacagaaatcccccttacacggaggcatcagtgaccaaacaggaaaaaaccgcccttaacatggcccgctttatcagaagccagacattaacgcttctggagaaactcaacgagctggacgcggatgaacaggcagacatctgtgaatcgcttcacgaccacgctgatgagctttaccgcagctgcctcgcgcgtttcggtgatgacggtgaaaacctctgacacatgcagctcccggagacggtcacagcttgtctgtaagcggatgccgggagcagacaagcccgtcagggcgcgtcagcgggtgttggcgggtgtcggggcgcagccatgacccagtcacgtagcgatagcggagtgtatactggcttaactatgcggcatcagagcagattgtactgagagtgcaccatatgcggtgtgaaataccgcacagatgcgtaaggagaaaataccgcatcaggcgctcttccgcttcctcgctcactgactcgctgcgctcggtcgttcggctgcggcgagcggtatcagctcactcaaaggcggtaatacggttatccacagaatcaggggataacgcaggaaagaacatgtgagcaaaaggccagcaaaaggccaggaaccgtaaaaaggccgcgttgctggcgtttttccataggctccgcccccctgacgagcatcacaaaaatcgacgctcaagtcagaggtggcgaaacccgacaggactataaagataccaggcgtttccccctggaagctccctcgtgcgctctcctgttccgaccctgccgcttaccggatacctgtccgcctttctcccttcgggaagcgtggcgctttctcatagctcacgctgtaggtatctcagttcggtgtaggtcgttcgctccaagctgggctgtgtgcacgaaccccccgttcagcccgaccgctgcgccttatccggtaactatcgtcttgagtccaacccggtaagacacgacttatcgccactggcagcagccactggtaacaggattagcagagcgaggtatgtaggcggtgctacagagttcttgaagtggtggcctaactacggctacactagaaggacagtatttggtatctgcgctctgctgaagccagttaccttcggaaaaagagttggtagctcttgatccggcaaacaaaccaccgctggtagcggtggtttttttgtttgcaagcagcagattacgcgcagaaaaaaaggatctcaagaagatcctttgatcttttctacggggtctgacgctcagtggaacgaaaactcacgttaagggattttggtcatgagattatcaaaaaggatcttcacctagatccttttaaattaaaaatgaagttttaaatcaagcgatcgcgtcagttaacggcagccggagtgcgcagccgccggcagcctcgctctgcccactgggtggggcgggaggtaggtggggtgaggcgagctggacgtgcgggcgcggtcggcctctggcggggcgggggaggggagggagggtcagcgaaagtagctcgcgcgcgagcggccgcccaccctccccttcctctgggggagtcgttttacccgccgccggccgggcctcgtcgtctgattggctctcggggcccagaaaactggcccttgccattggctcgtgttcgtgcaagttgagtccatccgccggccagcgggggcggcgaggaggcgctcccaggttccggccctcccctcggctccgcgccgcagagtctggccgcgcgcccctgcgcaacgtggcaggaagcgcgcgctgggggcggggacgggcagtagggctgagcggctgcggggcgggtgcaagcacgtttccgacttgagttgcctcaagaggggcgtgctgagccagacctccatcgcgcactccggggagtggagggaaggagcgagggctcagttgggctgttttggaggcaggaagcacttgctctcccaaagtcgctctgagttgttatcagtaagggagctgcagtggagtaggcggggagaaggccgcacccttctccggaggggggaggggagtgttgcaatacctttctgggagttctctgctgcctcctggcttctgaggaccgccctgggcctgggagaatcccttccccctcttccctcgtgatctgcaactccagtctttctagagatgttgcgactgtagagcgttgaccctgacacaatacttacgataacttcgtataatgtatgctatacgaagttatagtaattcatacaaaaggactcgcccctgccttggggaatcccagggaccgtcgttaaactcccactaacgtagaacccagaattcgatatcgccggctctgcggcctcttccgcgtcttcgccttcgccctcagacgagtcggatctccctttgggccgcctccccgcctgataacttcgtataatgtatgctatacgaagttatcgttacataacttacggtaaatggcccgcctggctgaccgcccaacgacccccgcccattgacgtcaataatgacgtatgttcccatagtaacgccaatagggactttccattgacgtcaatgggtggactatttacggtaaactgcccacttggcagtacatcaagtgtatcatatgccaagtacgccccctattgacgtcaatgacggtaaatggcccgcctggcattatgcccagtacatgaccttatgggactttcctacttggcagtacatctacgtattagtcatcgctattaccatgggtcgaggtgagccccacgttctgcttcactctccccatctcccccccctccccacccccaattttgtatttatttattttttaattattttgtgcagcgatgggggcggggggggggggggcgcgcgccaggcggggcggggcggggcgaggggcggggcggggcgaggcggagaggtgcggcggcagccaatcagagcggcgcgctccgaaagtttccttttatggcgaggcggcggcggcggcggccctataaaaagcgaagcgcgcggcgggcgggagtcgctgcgttgccttcgccccgtgccccgctccgcgccgcctcgcgccgcccgccccggctctgactgaccgcgttactcccacaggtgagcgggcgggacggcccttctcctccgggctgtaattagcgcttggtttaatgacggctcgtttcttttctgtggctgcgtgaaagccttaaagggctccgggagggccctttgtgcgggggggagcggctcggggggtgcgtgcgtgtgtgtgtgcgtggggagcgccgcgtgcggcccgcgctgcccggcggctgtgagcgctgcgggcgcggcgcggggctttgtgcgctccgcgtgtgcgcgaggggagcgcggccgggggcggtgccccgcggtgcgggggggctgcgaggggaacaaaggctgcgtgcggggtgtgtgcgtgggggggtgagcagggggtgtgggcgcggcggtcgggctgtaacccccccctgcacccccctccccgagttgctgagcacggcccggcttcgggtgcggggctccgtgcggggcgtggcgcggggctcgccgtgccgggcggggggtggcggcaggtgggggtgccgggcggggcggggccgcctcgggccggggagggctcgggggaggggcgcggcggccccggagcgccggcggctgtcgaggcgcggcgagccgcagccattgccttttatggtaatcgtgcgagagggcgcagggacttcctttgtcccaaatctggcggagccgaaatctgggaggcgccgccgcaccccctctagcgggcgcgggcgaagcggtgcggcgccggcaggaaggaaatgggcggggagggccttcgtgcgtcgccgcgccgccgtccccttctccatctccagcctcggggctgccgcagggggacggctgccttcgggggggacggggcagggcggggttcggcttctggcgtgtgaccggcggctctagagcctctgctaaccatgttcatgccttcttctttttcctacagctcctgggcaacgtgctggttattgtgctgtctcatcattttggcaaaggcacctgtgattgcctcgggagttgaaatacacccagattgccaccatggcctcaccgttgacccgctttctgtcgctgaacctgctgctgctgggtgagtcgattatcctggggagtggagaagctactagtatggtgagcaagggcgaggagctgttcaccggggtggtgcccatcctggtcgagctggacggcgacgtaaacggccacaagttcagcgtgtccggcgagggcgagggcgatgccacctacggcaagctgaccctgaagttcatctgcaccaccggcaagctgcccgtgccctggcccaccctcgtgaccaccctgacctacggcgtgcagtgcttcagccgctaccccgaccacatgaagcagcacgacttcttcaagtccgccatgcccgaaggctacgtccaggagcgcaccatcttcttcaaggacgacggcaactacaagacccgcgccgaggtgaagttcgagggcgacaccctggtgaaccgcatcgagctgaagggcatcgacttcaaggaggacggcaacatcctggggcacaagctggagtacaactacaacagccacaacgtctatatcatggccgacaagcagaagaacggcatcaaggtgaacttcaagatccgccacaacatcgaggacggcagcgtgcagctcgccgaccactaccagcagaacacccccatcggcgacggccccgtgctgctgcccgacaaccactacctgagcacccagtccgccctgagcaaagaccccaacgagaagcgcgatcacatggtcctgctggagttcgtgaccgccgccgggatcactctcggcatggatgaactatacaagactagtaagccacaggcacccgaactccgaatctttccaaagaaaatggacgccgaacttggtcagaaggtggacctggtatgtgaagtgttggggtccgtttcgcaaggatgctcttggctcttccagaactccagctccaaactcccccagcccaccttcgttgtctatatggcttcatcccacaacaagataacgtgggacgagaagctgaattcgtcgaaactgttttctgccatgagggacacgaataataagtacgttctcaccctgaacaagttcagcaaggaaaacgaaggctactatttctgctcagtcatcagcaactcggtgatgtacttcagttctgtcgtgccagtccttcagaaagtgaactctactactaccaagccagtgctgcgaactccctcacctgtgcaccctaccgggacatctcagccccagagaccagaagattgtcggccccgtggctcagtgaaggggaccggattggacttcgcctgtgatatttacatctgggcacccttggccggaatctgcgtggcccttctgctgtccttgatcatcactctcatctgctaccacagccgcggatccacctaattaccaatagtcggcggttatcagcggaccctacgaagttggagtaacgaccttgaagacgagtacagagttccggtttgaatcaacctctggattacaaaatttgtgaaagattgactggtattcttaactatgttgctccttttacgctatgtggatacgctgctttaatgcctttgtatcatgctattgcttcccgtatggctttcattttctcctccttgtataaatcctggttgctgtctctttatgaggagttgtggcccgttgtcaggcaacgtggcgtggtgtgcactgtgtttgctgacgcaacccccactggttggggcattgccaccacctgtcagctcctttccgggactttcgctttccccctccctattgccacggcggaactcatcgccgcctgccttgcccgctgctggacaggggctcggctgttgggcactgacaattccgtggtgttgtcctcgagtctagagggcccgtttaaacccgctgatcagcctcgactgtgccttctagttgccagccatctgttgtttgcccctcccccgtgccttccttgaccctggaaggtgccactcccactgtcctttcctaataaaatgaggaaattgcatcgcattgtctgagtaggtgtcattctattctggggggtggggtggggcaggacagcaagggggaggattgggaagacaatagcaggcatgctggggatgcggtgggctctatggctatgagttcgttccctccttgcctcctggtggtagatagccctacgggcgaccaaaggtcgcccgacgcccgggctttgcccgggcggcctcagtgagcgagcgagcgcgcagctgcctgcaggcctgaaaagtggataaccagcaccgttgtgagtgtctcctgggcgggagtcttctgggcaggcttaaaggctaacctggtgtgtgggcgttgtcctgcaggggaattgaacaggtgtaaaattggagggacaagacttcccacagattttcggttttgtcgggaagttttttaataggggcaaataaggaaaatgggaggataggtagtcatctggggttttatgcagcaaaactacaggttattattgcttgtgatccgcctcggagtattttccatcgaggtagattaaagacatgctcacccgagttttatactctcctgcttgagatccttactacagtatgaaattacagtgtcgcgagttagactatgtaagcagaattttaatcatttttaaagagcccagtacttcatatccatttctcccgctccttctgcagccttatcaaaaggtattttagaacactcattttagccccattttcatttattatactggcttatccaacccctagacagagcattggcattttccctttcctgatcttagaagtctgatgactcatgaaaccagacagattagttacatacaccacaaatcgaggctgtagctggggcctcaacactgcagttcttttataactccttagtacactttttgttgatcctttgccttgatccttaattttcagtgtctatcacctctcccgtcaggtggtgttccacatttgggcctattctcagtccagggagttttacaacaatagatgtattgagaatccaacctaaagcttaactttccactcccatgaatgcctctctcctttttctccatttagcgatcgcagacgtcaggtggcacttttcggggaaatgtgcgcggaacccctatttgtttatttttctaaatacattcaaatatgtatccgctcatgagacaataaccctgataaatgcttcaataatattgaaaaaggaagagtatgagtattcaacatttccgtgtcgcccttattcccttttttgcggcattttgccttcctgtttttgctcacccagaaacgctggtgaaagtaaaagatgctgaagatcagttgggtgcacgagtgggttacatcgaactggatctcaacagcggtaagatccttgagagttttcgccccgaagaacgttttccaatgatgagcacttttaaagttctgctatgtggcgcggtattatcccgtgttgacgccgggcaagagcaactcggtcgccgcatacactattctcagaatgacttggttgagtactcaccagtcacagaaaagcatcttacggatggcatgacagtaagagaattatgcagtgctgccataaccatgagtgataacactgcggccaacttacttctgacaacgatcggaggaccgaaggagctaaccgcttttttgcacaacatgggggatcatgtaactcgccttgatcgttgggaaccggagctgaatgaagccataccaaacgacgagcgtgacaccacgatgcctgcagcaatggcaacaacgttgcgcaaactattaactggcgaactacttactctagcttcccggcaacaattaatagactggatggaggcggataaagttgcaggaccacttctgcgctcggcccttccggctggctggtttattgctgataaatctggagccggtgagcgtgggtctcgcggtatcattgcagcactggggccagatggtaagccctcccgtatcgtagttatctacacgacggggagtcaggcaactatggatgaacgaaatagacagatcgctgagataggtgcctcactgattaagcattggtaactgtcagaccaagtttactcatatatactttagacgcagtccctgtcctgagtagtaaacttccgaatagagtg

SEQ ID NO: 96 - DNA, 8340 bp, synthetic construct
  source 1..8340: mol_type = other DNA
aggccgcacccttctccggaggggggaggggagtgttgcaatacctttctgggagttctctgctgcctcctggcttctgaggaccgccctgggcctgggagaatcccttccccctcttccctcgtgatctgcaactccagtctttctagagatgttgcgactgtagagcgttgaccctgacacaatacttacgataacttcgtataatgtatgctatacgaagttatagtaattcatacaaaaggactcgcccctgccttggggaatcccagggaccgtcgttaaactcccactaacgtagaacccagaattcgatatcgccggctctgcggcctcttccgcgtcttcgccttcgccctcagacgagtcggatctccctttgggccgcctccccgcctgataacttcgtataatgtatgctatacgaagttatcgttacataacttacggtaaatggcccgcctggctgaccgcccaacgacccccgcccattgacgtcaataatgacgtatgttcccatagtaacgccaatagggactttccattgacgtcaatgggtggagtatttacggtaaactgcccacttggcagtacatcaagtgtatcatatgccaagtacgccccctattgacgtcaatgacggtaaatggcccgcctggcattatgcccagtacatgaccttatgggactttcctacttggcagtacatctacgtattagtcatcgctattaccatggtcgaggtgagccccacgttctgcttcactctccccatctcccccccctccccacccccaattttgtatttatttattttttaattattttgtgcagcgatgggggcggggggggggggggggcgcgcgccaggcggggcggggcggggcgaggggcggggcggggcgaggcggagaggtgcggcggcagccaatcagagcggcgcgctccgaaagtttccttttatggcgaggcggcggcggcggcggccctataaaaagcgaagcgcgcggcgggcggggagtcgctgcgacgctgccttcgccccgtgccccgctccgccgccgcctcgcgccgcccgccccggctctgactgaccgcgttactcccacaggtgagcgggcgggacggcccttctcctccgggctgtaattagcgcttggtttaatgacggcttgtttcttttctgtggctgcgtgaaagccttgaggggctccgggagggccctttgtgcggggggagcggctcggggggtgcgtgcgtgtgtgtgtgcgtggggagcgccgcgtgcggctccgcgctgcccggcggctgtgagcgctgcgggcgcggcgcggggctttgtgcgctccgcagtgtgcgcgaggggagcgcggccgggggcggtgccccgcggtgcggggggggctgcgaggggaacaaaggctgcgtgcggggtgtgtgcgtgggggggtgagcagggggtgtgggcgcgtcggtcgggctgcaaccccccctgcacccccctccccgagttgctgagcacggcccggcttcgggtgcggggctccgtacggggcgtggcgcggggctcgccgtgccgggcggggggtggcggcaggtgggggtgccgggcggggcggggccgcctcgggccggggagggctcgggggaggggcgcggcggcccccggagcgccggcggctgtcgaggcgcggcgagccgcagccattgccttttatggtaatcgtgcgagagggcgcagggacttcctttgtcccaaatctgtgcggagccgaaatctgggaggcgccgccgcaccccctctagcgggcgcggggcgaagcggtgcggcgccggcaggaaggaaatgggcggggagggccttcgtgcgtcgccgcgccgccgtccccttctccctctccagcctcggggctgtccgcggggggacggctgccttcgggggggacggggcagggcggggttcggcttctggcgtgtgaccggcggctctagagcctctgctaaccatgttcatgccttcttctttttcctacaggcacctgtgattgcctcgggagttgaaatacacccagattgccaccatggcctcaccgttgacccgctttctgtcgctgaacctgctgctgctgggtgagtcgattatcctggggagtggagaagctactagtatggtgagcaagggcgaggagctgttcaccggggtggtgcccatcctggtcgagctggacggcgacgtaaacggccacaagttcagcgtgtccggcgagggcgagggcgatgccacctacggcaagctgaccctgaagttcatctgcaccaccggcaagctgcccgtgccctggcccaccctcgtgaccaccctgacctacggcgtgcagtgcttcagccgctaccccgaccacatgaagcagcacgacttcttcaagtccgccatgcccgaaggctacgtccaggagcgcaccatcttcttcaaggacgacggcaactacaagacccgcgccgaggtgaagttcgagggcgacaccctggtgaaccgcatcgagctgaagggcatcgacttcaaggaggacggcaacatcctggggcacaagctggagtacaactacaacagccacaacgtctatatcatggccgacaagcagaagaacggcatcaaggtgaacttcaagatccgccacaacatcgaggacggcagcgtgcagctcgccgaccactaccagcagaacacccccatcggcgacggccccgtgctgctgcccgacaaccactacctgagcacccagtccgccctgagcaaagaccccaacgagaagcgcgatcacatggtcctgctggagttcgtgaccgccgccgggatcactctcggcatggatgaactatacaagactagtaagccacaggcacccgaactccgaatctttccaaagaaaatggacgccgaacttggtcagaaggtggacctggtatgtgaagtgttggggtccgtttcgcaaggatgctcttggctcttccagaactccagctccaaactcccccagcccaccttcgttgtctatatggcttcatcccacaacaagataacgtgggacgagaagctgaattcgtcgaaactgttttctgccatgagggacacgaataataagtacgttctcaccctgaacaagttcagcaaggaaaacgaaggctactatttctgctcagtcatcagcaactcggtgatgtacttcagttctgtcgtgccagtccttcagaaagtgaactctactactaccaagccagtgctgcgaactccctcacctgtgcaccctaccgggacatctcagccccagagaccagaagattgtcggccccgtggctcagtgaaggggaccggattggacttcgcctgtgatatttacatctgggcacccttggccggaatctgcgtggcccttctgctgtccttgatcatcactctcatctgctaccacagccgcggatccacctaattaccaatagtcggcggttatcagcggaccctacgaagttctgtgccttctagttgccagccatctgttgtttgcccctcccccgtgccttccttgaccctggaaggtgccactcccactgtcctttcctaataaaatgaggaaattgcatcgcattgtctgagtaggtgtcattctattctggggggtggggtggggcaggacagcaagggggaggattgggaagagaatagcaggcatgctggggagcggccgcaggaacccctagtgatggagttggccactccctctctgcgcgctcgctcgctcactgaggccgggcgaccaaaggtcgcccgacgcccgggctttgcccgggcggcctcagtgagcgagcgagcgcgcagctgcctgcaggcctgaaaagtggataaccagcaccgttgtgagtgtctcctgggcgggagtcttctgggcaggcttaaaggctaacctggtgtgtgggcgttgtcctgcaggggaattgaacaggtgtaaaattggagggacaagacttcccacagattttcggttttgtcgggaagttttttaataggggcaaataaggaaaatgggaggataggtagtcatctggggttttatgcagcaaaactacaggttattattgcttgtgatccgcctcggagtattttccatcgaggtagattaaagacatgctcacccgagttttatactctcctgcttgagatccttactacagtatgaaattacagtgtcgcgagttagactatgtaagcagaattttaatcatttttaaagagcccagtacttcatatccatttctcccgctccttctgcagccttatcaaaaggtattttagaacactcattttagccccattttcatttattatactggcttatccaacccctagacagagcattggcattttccctttcctgatcttagaagtctgatgactcatgaaaccagacagattagttacatacaccacaaatcgaggctgtagctggggcctcaacactgcagttcttttataactccttagtacactttttgttgatcctttgccttgatccttaattttcagtgtctatcacctctcccgtcaggtggtgttccacatttgggcctattctcagtccagggagttttacaacaatagatgtattgagaatccaacctaaagcttaactttccactcccatgaatgcctctctcctttttctccatttagcgatcgcagacgtcaggtggcacttttcggggaaatgtgcgcggaacccctatttgtttatttttctaaatacattcaaatatgtatccgctcatgagacaataaccctgataaatgcttcaataatattgaaaaaggaagagtatgagtattcaacatttccgtgtcgcccttattcccttttttgcggcattttgccttcctgtttttgctcacccagaaacgctggtgaaagtaaaagatgctgaagatcagttgggtgcacgagtgggttacatcgaactggatctcaacagcggtaagatccttgagagttttcgccccgaagaacgttttccaatgatgagcacttttaaagttctgctatgtggcgcggtattatcccgtgttgacgccgggcaagagcaactcggtcgccgcatacactattctcagaatgacttggttgagtactcaccagtcacagaaaagcatcttacggatggcatgacagtaagagaattatgcagtgctgccataaccatgagtgataacactgcggccaacttacttctgacaacgatcggaggaccgaaggagctaaccgcttttttgcacaacatgggggatcatgtaactcgccttgatcgttgggaaccggagctgaatgaagccataccaaacgacgagcgtgacaccacgatgcctgcagcaatggcaacaacgttgcgcaaactattaactggcgaactacttactctagcttcccggcaacaattaatagactggatggaggcggataaagttgcaggaccacttctgcgctcggcccttccggctggctggtttattgctgataaatctggagccggtgagcgtgggtctcgcggtatcattgcagcactggggccagatggtaagccctcccgtatcgtagttatctacacgacggggagtcaggcaactatggatgaacgaaatagacagatcgctgagataggtgcctcactgattaagcattggtaactgtcagaccaagtttactcatatatactttagacgcagtccctgtcctgagtagtaaacttccgaatagagtgattctgacaccgtgagtaagcacaggtcgggtcttcaatcatcgtctacggattgggacaccgaggtttctgaactcaacatgatcgtgctcctgtcgttgaggacccggctaggctggcggggttgccttactggttagcagaatgaatcaccgatacgcgagcgaacgtgaagcgactgctgctgcaaaacgtctgcgacctgagcaacaacatgaatggtcttcggtttccgtgtttcgtaaagtctggaaacgcggaagtcagcgccctgcaccattatgttccggatctgcatcgcaggatgctgctggctaccctgtggaacacctacatctgtattaacgaagcgctggcattgaccctgagtgatttttctctggtcccgccgcatccataccgccagttgtttaccctcacaacgttccagtaaccgggcatgttcatcatcagtaacccgtatcgtgagcatcctctctcgtttcatcggtatcattacccccatgaacagaaatcccccttacacggaggcatcagtgaccaaacaggaaaaaaccgcccttaacatggcccgctttatcagaagccagacattaacgcttctggagaaactcaacgagctggacgcggatgaacaggcagacatctgtgaatcgcttcacgaccacgctgatgagctttaccgcagctgcctcgcgcgtttcggtgatgacggtgaaaacctctgacacatgcagctcccggagacggtcacagcttgtctgtaagcggatgccgggagcagacaagcccgtcagggcgcgtcagcgggtgttggcgggtgtcggggcgcagccatgacccagtcacgtagcgatagcggagtgtatactggcttaactatgcggcatcagagcagattgtactgagagtgcaccatatgcggtgtgaaataccgcacagatgcgtaaggagaaaataccgcatcaggcgctcttccgcttcctcgctcactgactcgctgcgctcggtcgttcggctgcggcgagcggtatcagctcactcaaaggcggtaatacggttatccacagaatcaggggataacgcaggaaagaacatgtgagcaaaaggccagcaaaaggccaggaaccgtaaaaaggccgcgttgctggcgtttttccataggctccgcccccctgacgagcatcacaaaaatcgacgctcaagtcagaggtggcgaaacccgacaggactataaagataccaggcgtttccccctggaagctccctcgtgcgctctcctgttccgaccctgccgcttaccggatacctgtccgcctttctcccttcgggaagcgtggcgctttctcatagctcacgctgtaggtatctcagttcggtgtaggtcgttcgctccaagctgggctgtgtgcacgaaccccccgttcagcccgaccgctgcgccttatccggtaactatcgtcttgagtccaacccggtaagacacgacttatcgccactggcagcagccactggtaacaggattagcagagcgaggtatgtaggcggtgctacagagttcttgaagtggtggcctaactacggctacactagaaggacagtatttggtatctgcgctctgctgaagccagttaccttcggaaaaagagttggtagctcttgatccggcaaacaaaccaccgctggtagcggtggtttttttgtttgcaagcagcagattacgcgcagaaaaaaaggatctcaagaagatcctttgatcttttctacggggtctgacgctcagtggaacgaaaactcacgttaagggattttggtcatgagattatcaaaaaggatcttcacctagatccttttaaattaaaaatgaagttttaaatcaagcgatcgcgtcagttaacggcagccggagtgcgcagccgccggcagcctcgctctgcccactgggtggggcgggaggtaggtggggtgaggcgagctggacgtgcgggcgcggtcggcctctggcggggcgggggaggggagggagggtcagcgaaagtagctcgcgcgcgagcggccgcccaccctccccttcctctgggggagtcgttttacccgccgccggccgggcctcgtcgtctgattggctctcggggcccagaaaactggcccttgccattggctcgtgttcgtgcaagttgagtccatccgccggccagcgggggcggcgaggaggcgctcccaggttccggccctcccctcggctccgcgccgcagagtctggccgcgcgcccctgcgcaacgtggcaggaagcgcgcgctgggggcggggacgggcagtagggctgagcggctgcggggcgggtgcaagcacgtttccgacttgagttgcctcaagaggggcgtgctgagccagacctccatcgcgcactccggggagtggagggaaggagcgagggctcagttgggctgttttggaggcaggaagcacttgctctcccaaagtcgctctgagttgttatcagtaagggagctgcagtggagtaggcggggaga

SEQ ID NO: 97 - DNA, 7632 bp, synthetic construct
  source 1..7632: mol_type = other DNA
gttgtttaccctcacaacgttccagtaaccgggcatgttcatcatcagtaacccgtatcgtgagcatcctctctcgtttcatcggtatcattacccccatgaacagaaatcccccttacacggaggcatcagtgaccaaacaggaaaaaaccgcccttaacatggcccgctttatcagaagccagacattaacgcttctggagaaactcaacgagctggacgcggatgaacaggcagacatctgtgaatcgcttcacgaccacgctgatgagctttaccgcagctgcctcgcgcgtttcggtgatgacggtgaaaacctctgacacatgcagctcccggagacggtcacagcttgtctgtaagcggatgccgggagcagacaagcccgtcagggcgcgtcagcgggtgttggcgggtgtcggggcgcagccatgacccagtcacgtagcgatagcggagtgtatactggcttaactatgcggcatcagagcagattgtactgagagtgcaccatatgcggtgtgaaataccgcacagatgcgtaaggagaaaataccgcatcaggcgctcttccgcttcctcgctcactgactcgctgcgctcggtcgttcggctgcggcgagcggtatcagctcactcaaaggcggtaatacggttatccacagaatcaggggataacgcaggaaagaacatgtgagcaaaaggccagcaaaaggccaggaaccgtaaaaaggccgcgttgctggcgtttttccataggctccgcccccctgacgagcatcacaaaaatcgacgctcaagtcagaggtggcgaaacccgacaggactataaagataccaggcgtttccccctggaagctccctcgtgcgctctcctgttccgaccctgccgcttaccggatacctgtccgcctttctcccttcgggaagcgtggcgctttctcatagctcacgctgtaggtatctcagttcggtgtaggtcgttcgctccaagctgggctgtgtgcacgaaccccccgttcagcccgaccgctgcgccttatccggtaactatcgtcttgagtccaacccggtaagacacgacttatcgccactggcagcagccactggtaacaggattagcagagcgaggtatgtaggcggtgctacagagttcttgaagtggtggcctaactacggctacactagaaggacagtatttggtatctgcgctctgctgaagccagttaccttcggaaaaagagttggtagctcttgatccggcaaacaaaccaccgctggtagcggtggtttttttgtttgcaagcagcagattacgcgcagaaaaaaaggatctcaagaagatcctttgatcttttctacggggtctgacgctcagtggaacgaaaactcacgttaagggattttggtcatgagattatcaaaaaggatcttcacctagatccttttaaattaaaaatgaagttttaaatcaagttgcgactgtagagcgttgaccctgacacaatacttacgattaccctgttatccctacgctaccttcggtgaaagtgagtcggcacaatctcgtaatgtgaacactgcttcgccacttattgatagtcgcaacgggagcgatcgctaaaagcagcgattcgtggctcagtcccagagtcgtatctagctagtcaggtagtaaaaggtctcaactaggcagtggcagagcaggattcaaattcagggctgttgtgatgcctccgcagactctgagcgccacctggtggtaatttgtctgtgcctcttctgacgtggaagaacagcaactaacacactaacacggcatttactatgggccagccattgttctaaagccctcgttcacagagaaagttcggttacactgcggatttcgacattgattattgactagttattaatagtaatcaattacggggtcattagttcatagcccatatatggagttccgcgttacataacttacggtaaatggcccgcctggctgaccgcccaacgacccccgcccattgacgtcaataatgacgtatgttcccatagtaacgccaatagggactttccattgacgtcaatgggtggactatttacggtaaactgcccacttggcagtacatcaagtgtatcatatgccaagtacgccccctattgacgtcaatgacggtaaatggcccgcctggcattatgcccagtacatgaccttatgggactttcctacttggcagtacatctacgtattagtcatcgctattaccatgggtcgaggtgagccccacgttctgcttcactctccccatctcccccccctccccacccccaattttgtatttatttattttttaattattttgtgcagcgatgggggcggggggggggggggcgcgcgccaggcggggcggggcggggcgaggggcggggcggggcgaggcggagaggtgcggcggcagccaatcagagcggcgcgctccgaaagtttccttttatggcgaggcggcggcggcggcggccctataaaaagcgaagcgcgcggcgggcgggagtcgctgcgttgccttcgccccgtgccccgctccgcgccgcctcgcgccgcccgccccggctctgactgaccgcgttactcccacaggtgagcgggcgggacggcccttctcctccgggctgtaattagcgcttggtttaatgacggctcgtttcttttctgtggctgcgtgaaagccttaaagggctccgggagggccctttgtgcgggggggagcggctcggggggtgcgtgcgtgtgtgtgtgcgtggggagcgccgcgtgcggcccgcgctgcccggcggctgtgagcgctgcgggcgcggcgcggggctttgtgcgctccgcgtgtgcgcgaggggagcgcggccgggggcggtgccccgcggtgcgggggggctgcgaggggaacaaaggctgcgtgcggggtgtgtgcgtgggggggtgagcagggggtgtgggcgcggcggtcgggctgtaacccccccctgcacccccctccccgagttgctgagcacggcccggcttcgggtgcggggctccgtgcggggcgtggcgcggggctcgccgtgccgggcggggggtggcggcaggtgggggtgccgggcggggcggggccgcctcgggccggggagggctcgggggaggggcgcggcggccccggagcgccggcggctgtcgaggcgcggcgagccgcagccattgccttttatggtaatcgtgcgagagggcgcagggacttcctttgtcccaaatctggcggagccgaaatctgggaggcgccgccgcaccccctctagcgggcgcgggcgaagcggtgcggcgccggcaggaaggaaatgggcggggagggccttcgtgcgtcgccgcgccgccgtccccttctccatctccagcctcggggctgccgcagggggacggctgccttcgggggggacggggcagggcggggttcggcttctggcgtgtgaccggcggctctagagcctctgctaaccatgttcatgccttcttctttttcctacagctcctgggcaacgtgctggttattgtgctgtctcatcattttggcaaaggcacctgtgattgcctcgggagttgaaatacacccagattgccaccatgaccgagtacaagcccacggtgcgcctcgccacccgcgacgacgtccccagggccgtacgcaccctcgccgccgcgttcgccgactaccccgccacgcgccacaccgtcgatccggaccgccacatcgagcgggtcaccgagctgcaagaactcttcctcacgcgcgtcgggctcgacatcggcaaggtgtgggtcgcggacgacggcgccgcggtggcggtctggaccacgccggagagcgtcgaagcgggggcggtgttcgccgagatcggcccgcgcatggccgagttgagcggttcccggctggccgcgcagcaacagatggaaggcctcctggcgccgcaccggcccaaggagcccgcgtggttcctggccaccgtcggcgtctcgcccgaccaccagggcaagggtctgggcagcgccgtcgtgctccccggagtggaggcggccgagcgcgccggggtgcccgccttcctggagacctccgcgccccgcaacctccccttctacgagcggctcggcttcaccgtcaccgccgacgtcgaggtgcccgaaggaccgcgcacctggtgcatgacccgcaagcccggtgccggcggcgggtccggaggagagggcagaggaagtctcctaacatgcggtgacgtggaggagaatcctggcccaatggcctctactggtctgcaaatcttggggatcgtcctgaccctgcttggctgggtcaacgccctggtgtcctgtgccctgcccatgtggaaggtgaccgccttcatcggcaacatggtgagcaagggcgaggagctgttcaccggggtggtgcccatcctggtcgagctggacggcgacgtaaacggccacaagttcagcgtgtccggcgagggcgagggcgatgccacctacggcaagctgaccctgaagttcatctgcaccaccggcaagctgcccgtgccctggcccaccctcgtgaccaccctgacctacggcgtgcagtgcttcagccgctaccccgaccacatgaagcagcacgacttcttcaagtccgccatgcccgaaggctacgtccaggagcgcaccatcttcttcaaggacgacggcaactacaagacccgcgccgaggtgaagttcgagggcgacaccctggtgaaccgcatcgagctgaagggcatcgacttcaaggaggacggcaacatcctggggcacaagctggagtacaactacaacagccacaacgtctatatcatggccgacaagcagaagaacggcatcaaggtgaacttcaagatccgccacaacatcgaggacggcagcgtgcagctcgccgaccactaccagcagaacacccccatcggcgacggccccgtgctgctgcccgacaaccactacctgagcacccagtccgccctgagcaaagaccccaacgagaagcgcgatcacatggtcctgctggagttcgtgaccgccgccgggatcactctcggcatggatgaactatactgattaccaatagtcggcggttatcagcggaccctacgaagttggagtaacgaccttgaagacgagtacagagttccggtttgaatcaacctctggattacaaaatttgtgaaagattgactggtattcttaactatgttgctccttttacgctatgtggatacgctgctttaatgcctttgtatcatgctattgcttcccgtatggctttcattttctcctccttgtataaatcctggttgctgtctctttatgaggagttgtggcccgttgtcaggcaacgtggcgtggtgtgcactgtgtttgctgacgcaacccccactggttggggcattgccaccacctgtcagctcctttccgggactttcgctttccccctccctattgccacggcggaactcatcgccgcctgccttgcccgctgctggacaggggctcggctgttgggcactgacaattccgtggtgttgtcctcgagtctagagggcccgtttaaacccgctgatcagcctcgactgtgccttctagttgccagccatctgttgtttgcccctcccccgtgccttccttgaccctggaaggtgccactcccactgtcctttcctaataaaatgaggaaattgcatcgcattgtctgagtaggtgtcattctattctggggggtggggtggggcaggacagcaagggggaggattgggaagacaatagcaggcatgctggggatgcggtgggctctatggctatgagttcgttccctccttgcctcctggtggtagatagttctccaaccgaagtgtttacggaagatagagcccgctgttagccctgagtctgcgttgtaagagcaataggtccactacgcgatcgcgcttttaccacgaacgataataggttggcgggtcactccaaaaagggtcgtgcggcgatactacaatctcctgttactcgtagggataacagggtaatcctgaaaagtggataaccagcaccgttgtgagtgtctcctagacgtcaggtggcacttttcggggaaatgtgcgcggaacccctatttgtttatttttctaaatacattcaaatatgtatccgctcatgagacaataaccctgataaatgcttcaataatattgaaaaaggaagagtatgagtattcaacatttccgtgtcgcccttattcccttttttgcggcattttgccttcctgtttttgctcacccagaaacgctggtgaaagtaaaagatgctgaagatcagttgggtgcacgagtgggttacatcgaactggatctcaacagcggtaagatccttgagagttttcgccccgaagaacgttttccaatgatgagcacttttaaagttctgctatgtggcgcggtattatcccgtgttgacgccgggcaagagcaactcggtcgccgcatacactattctcagaatgacttggttgagtactcaccagtcacagaaaagcatcttacggatggcatgacagtaagagaattatgcagtgctgccataaccatgagtgataacactgcggccaacttacttctgacaacgatcggaggaccgaaggagctaaccgcttttttgcacaacatgggggatcatgtaactcgccttgatcgttgggaaccggagctgaatgaagccataccaaacgacgagcgtgacaccacgatgcctgcagcaatggcaacaacgttgcgcaaactattaactggcgaactacttactctagcttcccggcaacaattaatagactggatggaggcggataaagttgcaggaccacttctgcgctcggcccttccggctggctggtttattgctgataaatctggagccggtgagcgtgggtctcgcggtatcattgcagcactggggccagatggtaagccctcccgtatcgtagttatctacacgacggggagtcaggcaactatggatgaacgaaatagacagatcgctgagataggtgcctcactgattaagcattggtaactgtcagaccaagtttactcatatatactttagacgcagtccctgtcctgagtagtaaacttccgaatagagtgattctgacaccgtgagtaagcacaggtcgggtcttcaatcatcgtctacggattgggacaccgaggtttctgaactcaacatgatcgtgctcctgtcgttgaggacccggctaggctggcggggttgccttactggttagcagaatgaatcaccgatacgcgagcgaacgtgaagcgactgctgctgcaaaacgtctgcgacctgagcaacaacatgaatggtcttcggtttccgtgtttcgtaaagtctggaaacgcggaagtcagcgccctgcaccattatgttccggatctgcatcgcaggatgctgctggctaccctgtggaacacctacatctgtattaacgaagcgctggcattgaccctgagtgatttttctctggtcccgccgcatccataccgcca

SEQ ID NO: 98 - DNA, 7835 bp, synthetic construct
  source 1..7835: mol_type = other DNA
tttttctgcgcgtaatctgctgcttgcaaacaaaaaaaccaccgctaccagcggtggtttgtttgccggatcaagagctaccaactctttttccgaaggtaactggcttcagcagagcgcagataccaaatactgtccttctagtgtagccgtagttaggccaccacttcaagaactctgtagcaccgcctacatacctcgctctgctaatcctgttaccagtggctgctgccagtggcgataagtcgtgtcttaccgggttggactcaagacgatagttaccggataaggcgcagcggtcgggctgaacggggggttcgtgcacacagcccagcttggagcgaacgacctacaccgaactgagatacctacagcgtgagctatgagaaagcgccacgcttcccgaagggagaaaggcggacaggtatccggtaagcggcagggtcggaacaggagagcgcacgagggagcttccagggggaaacgcctggtatctttatagtcctgtcgggtttcgccacctctgacttgagcgtcgatttttgtgatgctcgtcaggggggcggagcctatggaaaaacgccagcaacgcggcctttttacggttcctggccttttgctggccttttgctcacatgttctttcctgcgttatcccctgattctgtggataaccgtattaccgcctttgagtgagctgataccgctcgccgcagccgaacgaccgagcgcagcgagtcagtgagcgaggaagcggaagagcgcccaatacgcaaaccgcctctccccgcgcgttggccgattcattaatgcagctggcacgacaggtttcccgactggaaagcgggcagtgagcgcaacgcaattaatgtgagttagctcactcattaggcaccccaggctttacactttatgcttccggctcgtatgttgtgtggaattgtgagcggataacaatttcacacaggaaacagctatgaccatgattacgccaagcgcgcaattaaccctcactaaagggaacaaaagctggagctccaccgcggggcgcgccgcagctagattaaccctagaaagatagtctgcgtaaaattgacgcatgcattcttgaaatattgctctctctttctaaatagcgcgaatccgtcgctgtgcatttaggacatctcagtcgccgcttggagctcccgtgaggcgtgcttgtcaatgcggtaagtgtcactgattttgaactataacaaccgcgtgagtcaaaatgacgcatgattatcttttacgtgacttttaagatttaactcatacgataattatattgttatttcgtgttctacttacgtgataacttattatatatatattttcttgttatagatgggaattcagacatgataagatacattgatgagtttggacaaaccacaactagaatgcagtgaaaaaaatgctttatttgtgaaatttgtgatgctattgctttatttgtaaccattataagctgcaataaacaagtttcgaggtcgagtgtcagtcctgctcctcggccacgaagtgcttagctcaggcaccgggcttgcgggtcatgcaccaggtgcgcggtccttcgggcacctcgacgtcggcggtgacggtgaagccgagccgctcgtagaaggggaggttgcggggcgcggaggtctccaggaaggcgggcaccccggcgcgctcggccgcctccactccggggagcacgacggcgctgcccagacccttgccctggtggtcgggcgagacgccgacggtggccaggaaccacgcgggctccttgggccggtgcggcgccaggaggccttccatctgttgctgcgcggccagccgggaaccgctcaactcggccatgcgcgggccgatctcggcgaacaccgcccccgcttcgacgctctccggcgtggtccagaccgccaccgcggcgccgtcgtccgcgacccacaccttgccgatgtcgagcccgacgcgcgtgaggaagagttcttgcagctcggtgacccgctcgatgtggcggtccgggtcgacggtgtggcgcgtggcggggtagtcggcgaacgcggcggcgagggtgcgtacggcccgggggacgtcgtcgcgggtggcgaggcgcaccgtgggcttgtactcggccatggtagggccgggattctcctccacgtcaccgcatgttagaagacttcctctgccctccccggggagcatgtcaaggtcaaaatcgtcaagagcgtcagcaggcagcatatcaaggtcaaagtcgtcaagggcatcggctgggagcatgtctaagtcaaaatcgtcaagggcgtcggccggcccgccgctttcgcactttagctgtttctccaggccacatatgattagttccaggccgaaaaggaaggcaggttcggctccctgccggtcgaacagctcaattgcttgtctcagaagtgggggcatagaatcggtggtaggtgtctctctttcctcttttgctacttgatgctcctgttcctccaatacgcagcccagtgtaaagtggcccacggcggacagagcgtacagtgcgttctccagggagaagccttgctgacacaggaacgcgagctgattttccagggtttcgtactgtttctctgttgggcgggtgccgagatgcactttagccccgtcgcgatgtgagaggagagcacagcggaatgacttggcgttgttccgcagaaagtcttgccatgactcgccttccagggggcagaagtgggtatgatgcctgtccagcatctcgattggcagggcatcgagcagggcccgcttgttcttcacgtgccagtacagggtaggctgctcaactcccagcttttgagcgagtttccttgtcgtcaggccttcgataccgactccattgagtaattccagagcgccgtttatgactttgctcttgtccagtctagacatggggtttagttcctcaccttgtcgtattatactatgccgatatactatgccgatgattaattgtcaacacggtccggtctaacaaaaaagccaaaaacggccagaatttagcggacaatttactagtctaacactgaaaattacatattgacccaaatgattacatttcaaaaggtgcctaaaaaacttcacaaaacacactcgccaaccccgagcgcatagttcaaaaccggagcttcagctacttaagaagataggtacataaaaccgaccaaagaaactgacgcctcacttatccctcccctcaccagaggtccggcgcctgtcgattcaggagagcctaccctaggcccgaaccctgcgtcctgcgacggagaaaagcctaccgcacacctaccggcaggtggccccaccctgcattataagccaacagaacgggtgacgtcacgacacgacgagggcgcgcgctcccaaaggtacgggtgcactgcccaacggcaccgccataactgccgcccccgcaacagacgacaaaccgagttctccagtcagtgacaaacttcacgtcagggtccccagatggtgccccagcccatctcacccgaataagagctttcccgcattagcgaaggcctcaagaccttgggttcttgccgcccaccatgccccccaccttgtttcaacgacctcacagcccgcctcacaagcgtcttccattcaagactcgggaacagccgccattttgctgcgctccccccaacccccagttcagggcaaccttgctcgcggacccagactacagcccttggcggtctctccacacgcttccgtcccaccgagcggcccggcggccacgaaagccccggccagcccagcagcccgctactcaccaagtgacgatcacagcgatccacaaacaagaaccgcgacccaaatcccggctgcgacggaactagctgtgccacacccggcgcgtccttatataatcatcggcgttcaccgccccacggagatccctccgcagaatcgccgagaagggactacttttcctcgcctgttccgctctctggaaagaaaaccagtgccctagagtcacccaagtcccgtcctaaaatgtccttctgctgatactggggttctaaggccgagtcttatgagcagcgggccgctgtcctgagcgtccgggcggaaggatcaggacgctcgtgcgcccttcgtctgacgtggcagcgctcgccgtgaggagggggcgcccgcggggggcgccaaaacccggcgcggaggccagatctcccgatctcgagtttactccctatcagtgatagagaacgtatgtcgagtttactccctatcagtgatagagaacgatgtcgagtttactccctatcagtgatagagaacgtatgtcgagtttactccctatcagtgatagagaacgtatgtcgagtttactccctatcagtgatagagaacgtatgtcgagtttatccctatcagtgatagagaacgtatgtcgagtttactccctatcagtgatagagaacgtatgtcgaggtaggcgtgtacggtgggaggcctatataagcagagctcgtttagtgaaccgtcagatcgcctggagaattcgagctcggtacccggggatctgccaccatggagaccgacaccctcttgctctgggtcctgctgctgtgggttccgggtagtaccggagacatggtttctaagggtgaagaattgttcaccggagttgtgcccatcctggttgagctggacggagacgttaacggacacaagttctcagtgagcggcgaaggagagggcgacgctacgtacggtaaactgacgttgaagttcatctgtacaacaggaaagctgccagtgccctggcctacactcgtgaccaccctcacctacggagtccagtgcttctcccggtaccccgaccacatgaaacagcacgatttcttcaagtccgcgatgcctgagggctatgttcaggaacgcaccatattcttcaaggacgacggtaactataaaaccagggctgaagttaagttcgagggggacacgttggtaaatagaattgagttgaaaggaatcgatttcaaagaagacggcaatattttgggccacaagctggagtacaactacaacagccacaacgtgtatattatggctgataagcagaagaacggcatcaaggtgaacttcaaaatccgacacaatatcgaggatggctctgtgcaactggccgaccattaccagcaaaacacgcctatcggcgacggtccggttttgctgccagataaccactacctctccacgcaatcagccctctccaaggatcctaacgaaaaaagagaccatatggttctgcttgaattcgtgacggctgctgggatcaccctgggaatggatgagctgtataagaacgccgtgggccaggatacgcaggaggtgatcgtcgtgccccacagcttgcccttcaaggtcgtggttattagtgctatcctggcgttggtggtgctgactattatctcccttatcatacttatcatgctgtggcaaaaaaaaccccgataagcggccgcgattaaaaaacctcccacacctccccctgaacctgaaacataaaatgaatgcaattgttgttgttaacttgtttattgcagcttataatggttacaaataaagcaatagcatcacaaatttcacaaataaagcatttttttcactgcattctagttgtggtttgtccaaactcatcaatgtatcttaaggaattcgataaaagttttgttactttatagaagaaattttgagtttttgtttttttttaataaataaataaacataaataaattgtttgttgaatttattattagtatgtaagtgtaaatataataaaacttaatatctattcaaattaataaataaacctcgatatacagaccgataaaacacatgcgtcaattttacgcatgattatctttaacgtacgtcacaatatgattatctttctagggttaatctagctgcggcgcgccggtacccaattcgccctatagtgagtcgtattacgcgcgctcactggccgtcgttttacaacgtcgtgactgggaaaaccctggcgttacccaacttaatcgccttgcagcacatccccctttcgccagctggcgtaatagcgaagaggcccgcaccgatcgcccttcccaacagttgcgcagcctgaatggcgaatgggacgcgccctgtagcggcgcattaagcgcggcgggtgtggtggttacgcgcagcgtgaccgctacacttgccagcgccctagcgcccgctcctttcgctttcttcccttcctttctcgccacgttcgccggctttccccgtcaagctctaaatcgggggctccctttagggttccgatttagtgctttacggcacctcgaccccaaaaaacttgattagggtgatggttcacgtagtgggccatcgccctgatagacggtttttcgccctttgacgttggagtccacgttctttaatagtggactcttgttccaaactggaacaacactcaaccctatctcggtctattcttttgatttataagggattttgccgatttcggcctattggttaaaaaatgagctgatttaacaaaaatttaacgcgaattttaacaaaatattaacgcttacaatttaggtggcacttttcggggaaatgtgcgcggaacccctatttgtttatttttctaaatacattcaaatatgtatccgctcatgagacaataaccctgataaatgcttcaataatattgaaaaaggaagagtatgagtattcaacatttccgtgtcgcccttattcccttttttgcggcattttgccttcctgtttttgctcacccagaaacgctggtgaaagtaaaagatgctgaagatcagttgggtgcacgagtgggttacatcgaactggatctcaacagcggtaagatccttgagagttttcgccccgaagaacgttttccaatgatgagcacttttaaagttctgctatgtggcgcggtattatcccgtattgacgccgggcaagagcaactcggtcgccgcatacactattctcagaatgacttggttgagtactcaccagtcacagaaaagcatcttacggatggcatgacagtaagagaattatgcagtgctgccataaccatgagtgataacactgcggccaacttacttctgacaacgatcggaggaccgaaggagctaaccgcttttttgcacaacatgggggatcatgtaactcgccttgatcgttgggaaccggagctgaatgaagccataccaaacgacgagcgtgacaccacgatgcctgtagcaatggcaacaacgttgcgcaaactattaactggcgaactacttactctagcttcccggcaacaattaatagactggatggaggcggataaagttgcaggaccacttctgcgctcggcccttccggctggctggtttattgctgataaatctggagccggtgagcgtgggtctcgcggtatcattgcagcactggggccagatggtaagccctcccgtatcgtagttatctacacgacggggagtcaggcaactatggatgaacgaaatagacagatcgctgagataggtgcctcactgattaagcattggtaactgtcagaccaagtttactcatatatactttagattgatttaaaacttcatttttaatttaaaaggatctaggtgaagatcctttttgataatctcatgaccaaaatcccttaacgtgagttttcgttccactgagcgtcagaccccgtagaaaagatcaaaggatcttcttgagatcctt

SEQ ID NO: 99 - DNA, 9221 bp, synthetic construct
  source 1..9221: mol_type = other DNA
aacccgtatcgtgagcatcctctctcgtttcatcggtatcattacccccatgaacagaaatcccccttacacggaggcatcagtgaccaaacaggaaaaaaccgcccttaacatggcccgctttatcagaagccagacattaacgcttctggagaaactcaacgagctggacgcggatgaacaggcagacatctgtgaatcgcttcacgaccacgctgatgagctttaccgcagctgcctcgcgcgtttcggtgatgacggtgaaaacctctgacacatgcagctcccggagacggtcacagcttgtctgtaagcggatgccgggagcagacaagcccgtcagggcgcgtcagcgggtgttggcgggtgtcggggcgcagccatgacccagtcacgtagcgatagcggagtgtatactggcttaactatgcggcatcagagcagattgtactgagagtgcaccatatgcggtgtgaaataccgcacagatgcgtaaggagaaaataccgcatcaggcgctcttccgcttcctcgctcactgactcgctgcgctcggtcgttcggctgcggcgagcggtatcagctcactcaaaggcggtaatacggttatccacagaatcaggggataacgcaggaaagaacatgtgagcaaaaggccagcaaaaggccaggaaccgtaaaaaggccgcgttgctggcgtttttccataggctccgcccccctgacgagcatcacaaaaatcgacgctcaagtcagaggtggcgaaacccgacaggactataaagataccaggcgtttccccctggaagctccctcgtgcgctctcctgttccgaccctgccgcttaccggatacctgtccgcctttctcccttcgggaagcgtggcgctttctcatagctcacgctgtaggtatctcagttcggtgtaggtcgttcgctccaagctgggctgtgtgcacgaaccccccgttcagcccgaccgctgcgccttatccggtaactatcgtcttgagtccaacccggtaagacacgacttatcgccactggcagcagccactggtaacaggattagcagagcgaggtatgtaggcggtgctacagagttcttgaagtggtggcctaactacggctacactagaaggacagtatttggtatctgcgctctgctgaagccagttaccttcggaaaaagagttggtagctcttgatccggcaaacaaaccaccgctggtagcggtggtttttttgtttgcaagcagcagattacgcgcagaaaaaaaggatctcaagaagatcctttgatcttttctacggggtctgacgctcagtggaacgaaaactcacgttaagggattttggtcatgagattatcaaaaaggatcttcacctagatccttttaaattaaaaatgaagttttaaatcaagcgatcgccattctctcccctgggcctgtgccgctttctgtctgcagcttgtggcctgggtcacctctacggctggcccagatccttccctgccgcctccttcaggttccgtcttcctccactccctcttccccttgctctctgctgtgttgctgcccaaggatgctctttccggagcacttccttctcggcgctgcaccacgtgatgtcctctgagcggatcctccccgtgtctgggtcctctccgggcatctctcctccctcacccaaccccatgccgtcttcactcgctgggttcccttttccttctccttctggggcctgtgccatctctcgtttcttaggatggccttctccgacggatgtctcccttgcgtcccgcctccccttcttgtaggcctgcatcatcaccgtttttctggacaaccccaaagtaccccgtctccctggctttagccacctctccatcctcttgctttctttgcctggacaccccgttctcctgtggattcgggtcacctctcactcctttcatttgggcagctcccctaccccccttacctctctagtctgtgctagctcttccagccccctgtcatggcatcttccaggggtccgagagctcagctagtcttcttcctccaacccgggcccctatgtccacttcaggacagcatgtttgctgcctccagggatcctgtgtccccgagctgggaccaccttatattcccagggccggttaatgtggctctggttctgggtacttttatctgtcccctccaccccacagtggggccactagggacaggttgcgactgtagagcgttgaccctgacacaatacttacgataacttcgtataatgtatgctatacgaagttatagtaattcatacaaaaggactcgcccctgccttggggaatcccagggaccgtcgttaaactcccactaacgtagaacccagaattcgatcgttacataacttacggtaaatggcccgcctggctgaccgcccaacgacccccgcccattgacgtcaataatgacgtatgttcccatagtaacgccaatagggactttccattgacgtcaatgggtggagtatttacggtaaactgcccacttggcagtacatcaagtgtatcatatgccaagtacgccccctattgacgtcaatgacggtaaatggcccgcctggcattatgcccagtacatgaccttatgggactttcctacttggcagtacatctacgtattagtcatcgctattaccatggtcgaggtgagccccacgttctgcttcactctccccatctcccccccctccccacccccaattttgtatttatttattttttaattattttgtgcagcgatgggggcggggggggggggggggcgcgcgccaggcggggcggggcggggcgaggggcggggcggggcgaggcggagaggtgcggcggcagccaatcagagcggcgcgctccgaaagtttccttttatggcgaggcggcggcggcggcggccctataaaaagcgaagcgcgcggcgggcggggagtcgctgcgacgctgccttcgccccgtgccccgctccgccgccgcctcgcgccgcccgccccggctctgactgaccgcgttactcccacaggtgagcgggcgggacggcccttctcctccgggctgtaattagcgcttggtttaatgacggcttgtttcttttctgtggctgcgtgaaagccttgaggggctccgggagggccctttgtgcggggggagcggctcggggggtgcgtgcgtgtgtgtgtgcgtggggagcgccgcgtgcggctccgcgctgcccggcggctgtgagcgctgcgggcgcggcgcggggctttgtgcgctccgcagtgtgcgcgaggggagcgcggccgggggcggtgccccgcggtgcggggggggctgcgaggggaacaaaggctgcgtgcggggtgtgtgcgtgggggggtgagcagggggtgtgggcgcgtcggtcgggctgcaaccccccctgcacccccctccccgagttgctgagcacggcccggcttcgggtgcggggctccgtacggggcgtggcgcggggctcgccgtgccgggcggggggtggcggcaggtgggggtgccgggcggggcggggccgcctcgggccggggagggctcgggggaggggcgcggcggcccccggagcgccggcggctgtcgaggcgcggcgagccgcagccattgccttttatggtaatcgtgcgagagggcgcagggacttcctttgtcccaaatctgtgcggagccgaaatctgggaggcgccgccgcaccccctctagcgggcgcggggcgaagcggtgcggcgccggcaggaaggaaatgggcggggagggccttcgtgcgtcgccgcgccgccgtccccttctccctctccagcctcggggctgtccgcggggggacggctgccttcgggggggacggggcagggcggggttcggcttctggcgtgtgaccggcggctctagagcctctgctaaccatgttcatgccttcttctttttcctacaggcacctgtgattgcctcgggagttgaaatacacccagattgccaccatgaccgagtacaagcccacggtgcgcctcgccacccgcgacgacgtccccagggccgtacgcaccctcgccgccgcgttcgccgactaccccgccacgcgccacaccgtcgatccggaccgccacatcgagcgggtcaccgagctgcaagaactcttcctcacgcgcgtcgggctcgacatcggcaaggtgtgggtcgcggacgacggcgccgcggtggcggtctggaccacgccggagagcgtcgaagcgggggcggtgttcgccgagatcggcccgcgcatggccgagttgagcggttcccggctggccgcgcagcaacagatggaaggcctcctggcgccgcaccggcccaaggagcccgcgtggttcctggccaccgtcggcgtctcgcccgaccaccagggcaagggtctgggcagcgccgtcgtgctccccggagtggaggcggccgagcgcgccggggtgcccgccttcctggagacctccgcgccccgcaacctccccttctacgagcggctcggcttcaccgtcaccgccgacgtcgaggtgcccgaaggaccgcgcacctggtgcatgacccgcaagcccggtgccggcggcgggtccggaggagagggcagaggaagtctcctaacatgcggtgacgtggaggagaatcctggcccaatggcctcaccgttgacccgctttctgtcgctgaacctgctgctgctgggtgagtcgattatcctggggagtggagaagctactagtatggatcaagtccaactggtggagtctggtggcgctttggtgcagccaggtggctctctgcgtttgtcctgtgccgcttctggcttcccagtgaaccgctattccatgcgctggtatcgccaggctccaggcaaagagcgtgagtgggtagccggtatgtccagcgcgggtgatcgtagctcctatgaagactccgtgaagggccgtttcaccatcagccgtgacgatgcccgtaacacggtgtatctgcaaatgaacagcttgaaacctgaagatacggccgtgtattactgtaatgtgaacgtgggcttcgagtattggggccaaggcacccaggtcaccgtctccagcactagtaagccacaggcacccgaactccgaatctttccaaagaaaatggacgccgaacttggtcagaaggtggacctggtatgtgaagtgttggggtccgtttcgcaaggatgctcttggctcttccagaactccagctccaaactcccccagcccaccttcgttgtctatatggcttcatcccacaacaagataacgtgggacgagaagctgaattcgtcgaaactgttttctgccatgagggacacgaataataagtacgttctcaccctgaacaagttcagcaaggaaaacgaaggctactatttctgctcagtcatcagcaactcggtgatgtacttcagttctgtcgtgccagtccttcagaaagtgaactctactactaccaagccagtgctgcgaactccctcacctgtgcaccctaccgggacatctcagccccagagaccagaagattgtcggccccgtggctcagtgaaggggaccggattggacttcgcctgtgatatttacatctgggcacccttggccggaatctgcgtggcccttctgctgtccttgatcatcactctcatctgctaccacagccgcggatccaccatggtgagcaagggcgaggaggataacatggccatcatcaaggagttcatgcgcttcaaggtgcacatggagggctccgtgaacggccacgagttcgagatcgagggcgagggcgagggccgcccctacgagggcacccagaccgccaagctgaaggtgaccaagggtggccccctgcccttcgcctgggacatcctgtcccctcagttcatgtacggctccaaggcctacgtgaagcaccccgccgacatccccgactacttgaagctgtccttccccgagggcttcaagtgggagcgcgtgatgaacttcgaggacggcggcgtggtgaccgtgacccaggactcctccctgcaggacggcgagttcatctacaaggtgaagctgcgcggcaccaacttcccctccgacggccccgtaatgcagaagaagaccatgggctgggaggcctcctccgagcggatgtaccccgaggacggcgccctgaagggcgagatcaagcagaggctgaagctgaaggacggcggccactacgacgctgaggtcaagaccacctacaaggccaagaagcccgtgcagctgcccggcgcctacaacgtcaacatcaagttggacatcacctcccacaacgaggactacaccatcgtggaacagtacgaacgcgccgagggccgccactccaccggcggcatggacgagctgtacaagtaattaccaatagtcggcggttatcagcggaccctacgaagttgcggccgcgattaaaaaacctcccacacctccccctgaacctgaaacataaaatgaatgcaattgttgttgttaacttgtttattgcagcttataatggttacaaataaagcaatagcatcacaaatttcacaaataaagcatttttttcactgcattctagttgtggtttgtccaaactcatcaatgtatcttaagggccgcaggaacccctagtgatggagttggccactccctctctgcgcgctcgctcgctcactgaggccgggcgaccaaaggtcgcccgacgcccgggctttgcccgggcggcctcagtgagcgagcgagcgcgcagctgcctgcaggcctgaaaagtggataaccagcaccgttgtgagtgtctcctgattggtgacagaaaagccccatccttaggcctcctccttcctagtctcctgatattgggtctaacccccacctcctgttaggcagattccttatctggtgacacacccccatttcctggagccatctctctccttgccagaacctctaaggtttgcttacgatggagccagagaggatcctgggagggagagcttggcagggggtgggagggaagggggggatgcgtgacctgcccggttctcagtggccaccctgcgctaccctctcccagaacctgagctgctctgacgcggccgtctggtgcgtttcactgatcctggtgctgcagcttccttacacttcccaagaggagaagcagtttggaaaaacaaaatcagaataagttggtcctgagttctaactttggctcttcacctttctagtccccaatttatattgttcctccgtgcgtcagttttacctgtgagataaggccagtagccagccccgtcctggcagggctgtggtgaggaggggggtgtccgtgtggaaaactccctttgtgagaatggtgcgtcctaggtgttcaccaggtcgtggccgcctctactccctttctctttctccatccttctttccttaaagagtccccagtgctatctgggacatattcctccgcccagagcagggtcccgcttccctaaggccctgctctgggcttctgggtttgagtccttggcaagcccaggagaggcgctcaggcttccctgtcccccttcctcgtccaccatctcatgcccctggctctcctgccccttcgcgatcgcagacgtcaggtggcacttttcggggaaatgtgcgcggaacccctatttgtttatttttctaaatacattcaaatatgtatccgctcatgagacaataaccctgataaatgcttcaataatattgaaaaaggaagagtatgagtattcaacatttccgtgtcgcccttattcccttttttgcggcattttgccttcctgtttttgctcacccagaaacgctggtgaaagtaaaagatgctgaagatcagttgggtgcacgagtgggttacatcgaactggatctcaacagcggtaagatccttgagagttttcgccccgaagaacgttttccaatgatgagcacttttaaagttctgctatgtggcgcggtattatcccgtgttgacgccgggcaagagcaactcggtcgccgcatacactattctcagaatgacttggttgagtactcaccagtcacagaaaagcatcttacggatggcatgacagtaagagaattatgcagtgctgccataaccatgagtgataacactgcggccaacttacttctgacaacgatcggaggaccgaaggagctaaccgcttttttgcacaacatgggggatcatgtaactcgccttgatcgttgggaaccggagctgaatgaagccataccaaacgacgagcgtgacaccacgatgcctgcagcaatggcaacaacgttgcgcaaactattaactggcgaactacttactctagcttcccggcaacaattaatagactggatggaggcggataaagttgcaggaccacttctgcgctcggcccttccggctggctggtttattgctgataaatctggagccggtgagcgtgggtctcgcggtatcattgcagcactggggccagatggtaagccctcccgtatcgtagttatctacacgacggggagtcaggcaactatggatgaacgaaatagacagatcgctgagataggtgcctcactgattaagcattggtaactgtcagaccaagtttactcatatatactttagacgcagtccctgtcctgagtagtaaacttccgaatagagtgattctgacaccgtgagtaagcacaggtcgggtcttcaatcatcgtctacggattgggacaccgaggtttctgaactcaacatgatcgtgctcctgtcgttgaggacccggctaggctggcggggttgccttactggttagcagaatgaatcaccgatacgcgagcgaacgtgaagcgactgctgctgcaaaacgtctgcgacctgagcaacaacatgaatggtcttcggtttccgtgtttcgtaaagtctggaaacgcggaagtcagcgccctgcaccattatgttccggatctgcatcgcaggatgctgctggctaccctgtggaacacctacatctgtattaacgaagcgctggcattgaccctgagtgatttttctctggtcccgccgcatccataccgccagttgtttaccctcacaacgttccagtaaccgggcatgttcatcatcagt

SEQ ID NO: 100 - DNA, 8723 bp, synthetic construct
  source 1..8723: mol_type = other DNA
aacccgtatcgtgagcatcctctctcgtttcatcggtatcattacccccatgaacagaaatcccccttacacggaggcatcagtgaccaaacaggaaaaaaccgcccttaacatggcccgctttatcagaagccagacattaacgcttctggagaaactcaacgagctggacgcggatgaacaggcagacatctgtgaatcgcttcacgaccacgctgatgagctttaccgcagctgcctcgcgcgtttcggtgatgacggtgaaaacctctgacacatgcagctcccggagacggtcacagcttgtctgtaagcggatgccgggagcagacaagcccgtcagggcgcgtcagcgggtgttggcgggtgtcggggcgcagccatgacccagtcacgtagcgatagcggagtgtatactggcttaactatgcggcatcagagcagattgtactgagagtgcaccatatgcggtgtgaaataccgcacagatgcgtaaggagaaaataccgcatcaggcgctcttccgcttcctcgctcactgactcgctgcgctcggtcgttcggctgcggcgagcggtatcagctcactcaaaggcggtaatacggttatccacagaatcaggggataacgcaggaaagaacatgtgagcaaaaggccagcaaaaggccaggaaccgtaaaaaggccgcgttgctggcgtttttccataggctccgcccccctgacgagcatcacaaaaatcgacgctcaagtcagaggtggcgaaacccgacaggactataaagataccaggcgtttccccctggaagctccctcgtgcgctctcctgttccgaccctgccgcttaccggatacctgtccgcctttctcccttcgggaagcgtggcgctttctcatagctcacgctgtaggtatctcagttcggtgtaggtcgttcgctccaagctgggctgtgtgcacgaaccccccgttcagcccgaccgctgcgccttatccggtaactatcgtcttgagtccaacccggtaagacacgacttatcgccactggcagcagccactggtaacaggattagcagagcgaggtatgtaggcggtgctacagagttcttgaagtggtggcctaactacggctacactagaaggacagtatttggtatctgcgctctgctgaagccagttaccttcggaaaaagagttggtagctcttgatccggcaaacaaaccaccgctggtagcggtggtttttttgtttgcaagcagcagattacgcgcagaaaaaaaggatctcaagaagatcctttgatcttttctacggggtctgacgctcagtggaacgaaaactcacgttaagggattttggtcatgagattatcaaaaaggatcttcacctagatccttttaaattaaaaatgaagttttaaatcaagcgatcgccattctctcccctgggcctgtgccgctttctgtctgcagcttgtggcctgggtcacctctacggctggcccagatccttccctgccgcctccttcaggttccgtcttcctccactccctcttccccttgctctctgctgtgttgctgcccaaggatgctctttccggagcacttccttctcggcgctgcaccacgtgatgtcctctgagcggatcctccccgtgtctgggtcctctccgggcatctctcctccctcacccaaccccatgccgtcttcactcgctgggttcccttttccttctccttctggggcctgtgccatctctcgtttcttaggatggccttctccgacggatgtctcccttgcgtcccgcctccccttcttgtaggcctgcatcatcaccgtttttctggacaaccccaaagtaccccgtctccctggctttagccacctctccatcctcttgctttctttgcctggacaccccgttctcctgtggattcgggtcacctctcactcctttcatttgggcagctcccctaccccccttacctctctagtctgtgctagctcttccagccccctgtcatggcatcttccaggggtccgagagctcagctagtcttcttcctccaacccgggcccctatgtccacttcaggacagcatgtttgctgcctccagggatcctgtgtccccgagctgggaccaccttatattcccagggccggttaatgtggctctggttctgggtacttttatctgtcccctccaccccacagtggggccactagggacaggttgcgactgtagagcgttgaccctgacacaatacttacgataacttcgtataatgtatgctatacgaagttatagtaattcatacaaaaggactcgcccctgccttggggaatcccagggaccgtcgttaaactcccactaacgtagaacccagaattcgatcgttacataacttacggtaaatggcccgcctggctgaccgcccaacgacccccgcccattgacgtcaataatgacgtatgttcccatagtaacgccaatagggactttccattgacgtcaatgggtggagtatttacggtaaactgcccacttggcagtacatcaagtgtatcatatgccaagtacgccccctattgacgtcaatgacggtaaatggcccgcctggcattatgcccagtacatgaccttatgggactttcctacttggcagtacatctacgtattagtcatcgctattaccatggtcgaggtgagccccacgttctgcttcactctccccatctcccccccctccccacccccaattttgtatttatttattttttaattattttgtgcagcgatgggggcggggggggggggggggcgcgcgccaggcggggcggggcggggcgaggggcggggcggggcgaggcggagaggtgcggcggcagccaatcagagcggcgcgctccgaaagtttccttttatggcgaggcggcggcggcggcggccctataaaaagcgaagcgcgcggcgggcggggagtcgctgcgacgctgccttcgccccgtgccccgctccgccgccgcctcgcgccgcccgccccggctctgactgaccgcgttactcccacaggtgagcgggcgggacggcccttctcctccgggctgtaattagcgcttggtttaatgacggcttgtttcttttctgtggctgcgtgaaagccttgaggggctccgggagggccctttgtgcggggggagcggctcggggggtgcgtgcgtgtgtgtgtgcgtggggagcgccgcgtgcggctccgcgctgcccggcggctgtgagcgctgcgggcgcggcgcggggctttgtgcgctccgcagtgtgcgcgaggggagcgcggccgggggcggtgccccgcggtgcggggggggctgcgaggggaacaaaggctgcgtgcggggtgtgtgcgtgggggggtgagcagggggtgtgggcgcgtcggtcgggctgcaaccccccctgcacccccctccccgagttgctgagcacggcccggcttcgggtgcggggctccgtacggggcgtggcgcggggctcgccgtgccgggcggggggtggcggcaggtgggggtgccgggcggggcggggccgcctcgggccggggagggctcgggggaggggcgcggcggcccccggagcgccggcggctgtcgaggcgcggcgagccgcagccattgccttttatggtaatcgtgcgagagggcgcagggacttcctttgtcccaaatctgtgcggagccgaaatctgggaggcgccgccgcaccccctctagcgggcgcggggcgaagcggtgcggcgccggcaggaaggaaatgggcggggagggccttcgtgcgtcgccgcgccgccgtccccttctccctctccagcctcggggctgtccgcggggggacggctgccttcgggggggacggggcagggcggggttcggcttctggcgtgtgaccggcggctctagagcctctgctaaccatgttcatgccttcttctttttcctacaggcacctgtgattgcctcgggagttgaaatacacccagattgccaccatgaccgagtacaagcccacggtgcgcctcgccacccgcgacgacgtccccagggccgtacgcaccctcgccgccgcgttcgccgactaccccgccacgcgccacaccgtcgatccggaccgccacatcgagcgggtcaccgagctgcaagaactcttcctcacgcgcgtcgggctcgacatcggcaaggtgtgggtcgcggacgacggcgccgcggtggcggtctggaccacgccggagagcgtcgaagcgggggcggtgttcgccgagatcggcccgcgcatggccgagttgagcggttcccggctggccgcgcagcaacagatggaaggcctcctggcgccgcaccggcccaaggagcccgcgtggttcctggccaccgtcggcgtctcgcccgaccaccagggcaagggtctgggcagcgccgtcgtgctccccggagtggaggcggccgagcgcgccggggtgcccgccttcctggagacctccgcgccccgcaacctccccttctacgagcggctcggcttcaccgtcaccgccgacgtcgaggtgcccgaaggaccgcgcacctggtgcatgacccgcaagcccggtgccggcggcgggtccggaggagagggcagaggaagtctcctaacatgcggtgacgtggaggagaatcctggcccaatggtagagatgctgccaactgtcgctgtgctggtcttggcagtgtccgtggttgccaaggataacaccacgctgcaggaattcgccaccatggtgagcaagggcgaggaggataacatggccatcatcaaggagttcatgcgcttcaaggtgcacatggagggctccgtgaacggccacgagttcgagatcgagggcgagggcgagggccgcccctacgagggcacccagaccgccaagctgaaggtgaccaagggtggccccctgcccttcgcctgggacatcctgtcccctcagttcatgtacggctccaaggcctacgtgaagcaccccgccgacatccccgactacttgaagctgtccttccccgagggcttcaagtgggagcgcgtgatgaacttcgaggacggcggcgtggtgaccgtgacccaggactcctccctgcaggacggcgagttcatctacaaggtgaagctgcgcggcaccaacttcccctccgacggccccgtaatgcagaagaagaccatgggctgggaggcctcctccgagcggatgtaccccgaggacggcgccctgaagggcgagatcaagcagaggctgaagctgaaggacggcggccactacgacgctgaggtcaagaccacctacaaggccaagaagcccgtgcagctgcccggcgcctacaacgtcaacatcaagttggacatcacctcccacaacgaggactacaccatcgtggaacagtacgaacgcgccgagggccgccactccaccggcggcatggacgagctgtacaagcaggttcaactggtggaaagcggcggtgctctggtacaaccgggcggtagtctgcgcctgagctgtgccgcaagcggtttcccagtcaaccgctactctatgcgttggtatcgccaggcgcctggtaaagaacgtgaatgggttgccggcatgagcagtgcgggcgatcgttctagttacgaggactctgttaaaggtcgttttacaattagccgtgatgatgcgcgcaataccgtgtatctgcaaatgaacagtctgaagccggaggacaccgcagtatattattgcaatgtcaacgtggggtttgaatattggggccaggggactcaggtgacggtgagctctcaactcgagaatggcggcataagcctgctggttcagaacacatcctggatgctgctgctgctgctttccctctccctcctccaagccctggacttcatttctctgtaattaccaatagtcggcggttatcagcggaccctacgaagttgcggccgcgattaaaaaacctcccacacctccccctgaacctgaaacataaaatgaatgcaattgttgttgttaacttgtttattgcagcttataatggttacaaataaagcaatagcatcacaaatttcacaaataaagcatttttttcactgcattctagttgtggtttgtccaaactcatcaatgtatcttaagggccgcaggaacccctagtgatggagttggccactccctctctgcgcgctcgctcgctcactgaggccgggcgaccaaaggtcgcccgacgcccgggctttgcccgggcggcctcagtgagcgagcgagcgcgcagctgcctgcaggcctgaaaagtggataaccagcaccgttgtgagtgtctcctgattggtgacagaaaagccccatccttaggcctcctccttcctagtctcctgatattgggtctaacccccacctcctgttaggcagattccttatctggtgacacacccccatttcctggagccatctctctccttgccagaacctctaaggtttgcttacgatggagccagagaggatcctgggagggagagcttggcagggggtgggagggaagggggggatgcgtgacctgcccggttctcagtggccaccctgcgctaccctctcccagaacctgagctgctctgacgcggccgtctggtgcgtttcactgatcctggtgctgcagcttccttacacttcccaagaggagaagcagtttggaaaaacaaaatcagaataagttggtcctgagttctaactttggctcttcacctttctagtccccaatttatattgttcctccgtgcgtcagttttacctgtgagataaggccagtagccagccccgtcctggcagggctgtggtgaggaggggggtgtccgtgtggaaaactccctttgtgagaatggtgcgtcctaggtgttcaccaggtcgtggccgcctctactccctttctctttctccatccttctttccttaaagagtccccagtgctatctgggacatattcctccgcccagagcagggtcccgcttccctaaggccctgctctgggcttctgggtttgagtccttggcaagcccaggagaggcgctcaggcttccctgtcccccttcctcgtccaccatctcatgcccctggctctcctgccccttcgcgatcgcagacgtcaggtggcacttttcggggaaatgtgcgcggaacccctatttgtttatttttctaaatacattcaaatatgtatccgctcatgagacaataaccctgataaatgcttcaataatattgaaaaaggaagagtatgagtattcaacatttccgtgtcgcccttattcccttttttgcggcattttgccttcctgtttttgctcacccagaaacgctggtgaaagtaaaagatgctgaagatcagttgggtgcacgagtgggttacatcgaactggatctcaacagcggtaagatccttgagagttttcgccccgaagaacgttttccaatgatgagcacttttaaagttctgctatgtggcgcggtattatcccgtgttgacgccgggcaagagcaactcggtcgccgcatacactattctcagaatgacttggttgagtactcaccagtcacagaaaagcatcttacggatggcatgacagtaagagaattatgcagtgctgccataaccatgagtgataacactgcggccaacttacttctgacaacgatcggaggaccgaaggagctaaccgcttttttgcacaacatgggggatcatgtaactcgccttgatcgttgggaaccggagctgaatgaagccataccaaacgacgagcgtgacaccacgatgcctgcagcaatggcaacaacgttgcgcaaactattaactggcgaactacttactctagcttcccggcaacaattaatagactggatggaggcggataaagttgcaggaccacttctgcgctcggcccttccggctggctggtttattgctgataaatctggagccggtgagcgtgggtctcgcggtatcattgcagcactggggccagatggtaagccctcccgtatcgtagttatctacacgacggggagtcaggcaactatggatgaacgaaatagacagatcgctgagataggtgcctcactgattaagcattggtaactgtcagaccaagtttactcatatatactttagacgcagtccctgtcctgagtagtaaacttccgaatagagtgattctgacaccgtgagtaagcacaggtcgggtcttcaatcatcgtctacggattgggacaccgaggtttctgaactcaacatgatcgtgctcctgtcgttgaggacccggctaggctggcggggttgccttactggttagcagaatgaatcaccgatacgcgagcgaacgtgaagcgactgctgctgcaaaacgtctgcgacctgagcaacaacatgaatggtcttcggtttccgtgtttcgtaaagtctggaaacgcggaagtcagcgccctgcaccattatgttccggatctgcatcgcaggatgctgctggctaccctgtggaacacctacatctgtattaacgaagcgctggcattgaccctgagtgatttttctctggtcccgccgcatccataccgccagttgtttaccctcacaacgttccagtaaccgggcatgttcatcatcagt

SEQ ID NO: 101 - DNA, 7214 bp, synthetic construct
  source 1..7214: mol_type = other DNA
cgggactagggctgcgtgagtctctgagcgcaggcgggcggcggccgcccctcccccggcggcggcagcggcggcagcggcggcagctcactcagcccgctgcccgagcggaaacgccactgaccgcacggggattcccagtgccggcgccaggggcacgcgggacacgccccctcccgccgcgccattggcctctccgcccaccgccccacacttattggccggtgcgccgccaatcagcggaggctgccggggccgcctaaagaagaggctgtgctttggggctccggctcctcagagagcctcggctaggtaggggatcgggactctggcgggagggcggcttggtgcgtttgcggggatgggcggccgcggcaggccctccgagcgtggtggagccgttctgtgagacagccgggtacgagtcgtgacgctggaaggggcaagcgggtggtgggcaggaatgcggtccgccctgcagcaaccggagggggagggagaagggagcggaaaagtctccaccggacgcggccatggctcgggggggggggggcagcggaggagcgcttccggccgacgtctcgtcgctgattggcttcttttcctcccgccgtgtgtgaaaacacaaatggcgtgttttggttggcgtaaggcgcctgtcagttaacggcagccggagtgcgcagccgccggcagcctcgctctgcccactgggtggggcgggaggtaggtggggtgaggcgagctggacgtgcgggcgcggtcggcctctggcggggcgggggaggggagggagggtcagcgaaagtagctcgcgcgcgagcggccgcccaccctccccttcctctgggggagtcgttttacccgccgccggccgggcctcgtcgtctgattggctctcggggcccagaaaactggcccttgccattggctcgtgttcgtgcaagttgagtccatccgccggccagcgggggcggcgaggaggcgctcccaggttccggccctcccctcggctccgcgccgcagagtctggccgcgcgcccctgcgcaacgtggcaggaagcgcgcgctgggggcggggacgggcagtagggctgagcggctgcggggcgggtgcaagcacgtttccgacttgagttgcctcaagaggggcgtgctgagccagacctccatcgcgcactccggggagtggagggaaggagcgagggctcagttgggctgttttggaggcaggaagcacttgctctcccaaagtcgctctgagttgttatcagtaagggagctgcagtggagtaggcggggagaaggccgcacccttctccggaggggggaggggagtgttgcaatacctttctgggagttctctgctgcctcctggcttctgaggaccgccctgggcctgggagaatcccttccccctcttccctcgtgatctgcaactccagtctttctagagatgttgcgactgtagagcgttgaccctgacacaatacttacgataacttcgtataatgtatgctatacgaagttatagtaattcatacaaaaggactcgcccctgccttggggaatcccagggaccgtcgttaaactcccactaacgtagaacccagaattcgatatcgccggctctgcggcctcttccgcgtcttcgccttcgccctcagacgagtcggatctccctttgggccgcctccccgcctgataacttcgtataatgtatgctatacgaagttatcgttacataacttacggtaaatggcccgcctggctgaccgcccaacgacccccgcccattgacgtcaataatgacgtatgttcccatagtaacgccaatagggactttccattgacgtcaatgggtggactatttacggtaaactgcccacttggcagtacatcaagtgtatcatatgccaagtacgccccctattgacgtcaatgacggtaaatggcccgcctggcattatgcccagtacatgaccttatgggactttcctacttggcagtacatctacgtattagtcatcgctattaccatgggtcgaggtgagccccacgttctgcttcactctccccatctcccccccctccccacccccaattttgtatttatttattttttaattattttgtgcagcgatgggggcggggggggggggggcgcgcgccaggcggggcggggcggggcgaggggcggggcggggcgaggcggagaggtgcggcggcagccaatcagagcggcgcgctccgaaagtttccttttatggcgaggcggcggcggcggcggccctataaaaagcgaagcgcgcggcgggcgggagtcgctgcgttgccttcgccccgtgccccgctccgcgccgcctcgcgccgcccgccccggctctgactgaccgcgttactcccacaggtgagcgggcgggacggcccttctcctccgggctgtaattagcgcttggtttaatgacggctcgtttcttttctgtggctgcgtgaaagccttaaagggctccgggagggccctttgtgcgggggggagcggctcggggggtgcgtgcgtgtgtgtgtgcgtggggagcgccgcgtgcggcccgcgctgcccggcggctgtgagcgctgcgggcgcggcgcggggctttgtgcgctccgcgtgtgcgcgaggggagcgcggccgggggcggtgccccgcggtgcgggggggctgcgaggggaacaaaggctgcgtgcggggtgtgtgcgtgggggggtgagcagggggtgtgggcgcggcggtcgggctgtaacccccccctgcacccccctccccgagttgctgagcacggcccggcttcgggtgcggggctccgtgcggggcgtggcgcggggctcgccgtgccgggcggggggtggcggcaggtgggggtgccgggcggggcggggccgcctcgggccggggagggctcgggggaggggcgcggcggccccggagcgccggcggctgtcgaggcgcggcgagccgcagccattgccttttatggtaatcgtgcgagagggcgcagggacttcctttgtcccaaatctggcggagccgaaatctgggaggcgccgccgcaccccctctagcgggcgcgggcgaagcggtgcggcgccggcaggaaggaaatgggcggggagggccttcgtgcgtcgccgcgccgccgtccccttctccatctccagcctcggggctgccgcagggggacggctgccttcgggggggacggggcagggcggggttcggcttctggcgtgtgaccggcggctctagagcctctgctaaccatgttcatgccttcttctttttcctacagctcctgggcaacgtgctggttattgtgctgtctcatcattttggcaaaggcacctgtgattgcctcgggagttgaaatacacccagattgccaccatggcctcaccgttgacccgctttctgtcgctgaacctgctgctgctgggtgagtcgattatcctggggagtggagaagctactagtatggtgagcaagggcgaggagctgttcaccggggtggtgcccatcctggtcgagctggacggcgacgtaaacggccacaagttcagcgtgtccggcgagggcgagggcgatgccacctacggcaagctgaccctgaagttcatctgcaccaccggcaagctgcccgtgccctggcccaccctcgtgaccaccctgacctacggcgtgcagtgcttcagccgctaccccgaccacatgaagcagcacgacttcttcaagtccgccatgcccgaaggctacgtccaggagcgcaccatcttcttcaaggacgacggcaactacaagacccgcgccgaggtgaagttcgagggcgacaccctggtgaaccgcatcgagctgaagggcatcgacttcaaggaggacggcaacatcctggggcacaagctggagtacaactacaacagccacaacgtctatatcatggccgacaagcagaagaacggcatcaaggtgaacttcaagatccgccacaacatcgaggacggcagcgtgcagctcgccgaccactaccagcagaacacccccatcggcgacggccccgtgctgctgcccgacaaccactacctgagcacccagtccgccctgagcaaagaccccaacgagaagcgcgatcacatggtcctgctggagttcgtgaccgccgccgggatcactctcggcatggatgaactatacaagactagtaagccacaggcacccgaactccgaatctttccaaagaaaatggacgccgaacttggtcagaaggtggacctggtatgtgaagtgttggggtccgtttcgcaaggatgctcttggctcttccagaactccagctccaaactcccccagcccaccttcgttgtctatatggcttcatcccacaacaagataacgtgggacgagaagctgaattcgtcgaaactgttttctgccatgagggacacgaataataagtacgttctcaccctgaacaagttcagcaaggaaaacgaaggctactatttctgctcagtcatcagcaactcggtgatgtacttcagttctgtcgtgccagtccttcagaaagtgaactctactactaccaagccagtgctgcgaactccctcacctgtgcaccctaccgggacatctcagccccagagaccagaagattgtcggccccgtggctcagtgaaggggaccggattggacttcgcctgtgatatttacatctgggcacccttggccggaatctgcgtggcccttctgctgtccttgatcatcactctcatctgctaccacagccgcggatccacctaattaccaatagtcggcggttatcagcggaccctacgaagttggagtaacgaccttgaagacgagtacagagttccggtttgaatcaacctctggattacaaaatttgtgaaagattgactggtattcttaactatgttgctccttttacgctatgtggatacgctgctttaatgcctttgtatcatgctattgcttcccgtatggctttcattttctcctccttgtataaatcctggttgctgtctctttatgaggagttgtggcccgttgtcaggcaacgtggcgtggtgtgcactgtgtttgctgacgcaacccccactggttggggcattgccaccacctgtcagctcctttccgggactttcgctttccccctccctattgccacggcggaactcatcgccgcctgccttgcccgctgctggacaggggctcggctgttgggcactgacaattccgtggtgttgtcctcgagtctagagggcccgtttaaacccgctgatcagcctcgactgtgccttctagttgccagccatctgttgtttgcccctcccccgtgccttccttgaccctggaaggtgccactcccactgtcctttcctaataaaatgaggaaattgcatcgcattgtctgagtaggtgtcattctattctggggggtggggtggggcaggacagcaagggggaggattgggaagacaatagcaggcatgctggggatgcggtgggctctatggctatgagttcgttccctccttgcctcctggtggtagatagccctacgggcgaccaaaggtcgcccgacgcccgggctttgcccgggcggcctcagtgagcgagcgagcgcgcagctgcctgcaggcctgaaaagtggataaccagcaccgttgtgagtgtctcctgggcgggagtcttctgggcaggcttaaaggctaacctggtgtgtgggcgttgtcctgcaggggaattgaacaggtgtaaaattggagggacaagacttcccacagattttcggttttgtcgggaagttttttaataggggcaaataaggaaaatgggaggataggtagtcatctggggttttatgcagcaaaactacaggttattattgcttgtgatccgcctcggagtattttccatcgaggtagattaaagacatgctcacccgagttttatactctcctgcttgagatccttactacagtatgaaattacagtgtcgcgagttagactatgtaagcagaattttaatcatttttaaagagcccagtacttcatatccatttctcccgctccttctgcagccttatcaaaaggtattttagaacactcattttagccccattttcatttattatactggcttatccaacccctagacagagcattggcattttccctttcctgatcttagaagtctgatgactcatgaaaccagacagattagttacatacaccacaaatcgaggctgtagctggggcctcaacactgcagttcttttataactccttagtacactttttgttgatcctttgccttgatccttaattttcagtgtctatcacctctcccgtcaggtggtgttccacatttgggcctattctcagtccagggagttttacaacaatagatgtattgagaatccaacctaaagcttaactttccactcccatgaatgcctctctcctttttctccatttataaactgagctattaaccattaatggtttccaggtggatgtctcctcccccaatattacctgatgtatcttacatattgccaggctgatattttaagacattaaaaggtatatttcattattgagccacatggtattgattactgcttactaaaattttgtcattgtacacatctgtaaaaggtggttccttttggaatgcaaagttcaggtgtttgttgtctttcctgacctaaggtcttgtgagcttgtattttttctatttaagcagtgctttctcttggactggcttgactcatggcattctacacgttattgctggtctaaatgtgattttgccaagcttcttcaggacctataattttgcttgacttgtagccaaacacaagtaaaatgattaagcaacaaatgtatttgtgaagcttggtttttaggttgttgtgttgtgtgtgcttgtgctctataataatactatccaggggctggagaggtggctcggagttcaagagcacagactgctcttccagaagtcctgagttcaattcccagcaaccacatggtggctcacaaccatctgtaatgggatctgatgccctcttctggtgtgtctgaagaccacaagtgtattcacattaaataaataaatcctccttcttcttcttttttttttttttaaagagaa

SEQ ID NO: 102 - DNA, 6224 bp, synthetic construct
  source 1..6224: mol_type = other DNA
cgggactagggctgcgtgagtctctgagcgcaggcgggcggcggccgcccctcccccggcggcggcagcggcggcagcggcggcagctcactcagcccgctgcccgagcggaaacgccactgaccgcacggggattcccagtgccggcgccaggggcacgcgggacacgccccctcccgccgcgccattggcctctccgcccaccgccccacacttattggccggtgcgccgccaatcagcggaggctgccggggccgcctaaagaagaggctgtgctttggggctccggctcctcagagagcctcggctaggtaggggatcgggactctggcgggagggcggcttggtgcgtttgcggggatgggcggccgcggcaggccctccgagcgtggtggagccgttctgtgagacagccgggtacgagtcgtgacgctggaaggggcaagcgggtggtgggcaggaatgcggtccgccctgcagcaaccggagggggagggagaagggagcggaaaagtctccaccggacgcggccatggctcgggggggggggggcagcggaggagcgcttccggccgacgtctcgtcgctgattggcttcttttcctcccgccgtgtgtgaaaacacaaatggcgtgttttggttggcgtaaggcgcctgtcagttaacggcagccggagtgcgcagccgccggcagcctcgctctgcccactgggtggggcgggaggtaggtggggtgaggcgagctggacgtgcgggcgcggtcggcctctggcggggcgggggaggggagggagggtcagcgaaagtagctcgcgcgcgagcggccgcccaccctccccttcctctgggggagtcgttttacccgccgccggccgggcctcgtcgtctgattggctctcggggcccagaaaactggcccttgccattggctcgtgttcgtgcaagttgagtccatccgccggccagcgggggcggcgaggaggcgctcccaggttccggccctcccctcggctccgcgccgcagagtctggccgcgcgcccctgcgcaacgtggcaggaagcgcgcgctgggggcggggacgggcagtagggctgagcggctgcggggcgggtgcaagcacgtttccgacttgagttgcctcaagaggggcgtgctgagccagacctccatcgcgcactccggggagtggagggaaggagcgagggctcagttgggctgttttggaggcaggaagcacttgctctcccaaagtcgctctgagttgttatcagtaagggagctgcagtggagtaggcggggagaaggccgcacccttctccggaggggggaggggagtgttgcaatacctttctgggagttctctgctgcctcctggcttctgaggaccgccctgggcctgggagaatcccttccccctcttccctcgtgatctgcaactccagtctttctagagatgttgcgactgtagagcgttgaccctgacacaatacttacgataacttcgtataatgtatgctatacgaagttatagtaattcatacaaaaggactcgcccctgccttggggaatcccagggaccgtcgttaaactcccactaacgtagaacccagaattcgatatcgccggctctgcggcctcttccgcgtcttcgccttcgccctcagacgagtcggatctccctttgggccgcctccccgcctgataacttcgtataatgtatgctatacgaagttatcgttacataacttacggtaaatggcccgcctggctgaccgcccaacgacccccgcccattgacgtcaataatgacgtatgttcccatagtaacgccaatagggactttccattgacgtcaatgggtggagtatttacggtaaactgcccacttggcagtacatcaagtgtatcatatgccaagtacgccccctattgacgtcaatgacggtaaatggcccgcctggcattatgcccagtacatgaccttatgggactttcctacttggcagtacatctacgtattagtcatcgctattaccatggtcgaggtgagccccacgttctgcttcactctccccatctcccccccctccccacccccaattttgtatttatttattttttaattattttgtgcagcgatgggggcggggggggggggggggcgcgcgccaggcggggcggggcggggcgaggggcggggcggggcgaggcggagaggtgcggcggcagccaatcagagcggcgcgctccgaaagtttccttttatggcgaggcggcggcggcggcggccctataaaaagcgaagcgcgcggcgggcggggagtcgctgcgacgctgccttcgccccgtgccccgctccgccgccgcctcgcgccgcccgccccggctctgactgaccgcgttactcccacaggtgagcgggcgggacggcccttctcctccgggctgtaattagcgcttggtttaatgacggcttgtttcttttctgtggctgcgtgaaagccttgaggggctccgggagggccctttgtgcggggggagcggctcggggggtgcgtgcgtgtgtgtgtgcgtggggagcgccgcgtgcggctccgcgctgcccggcggctgtgagcgctgcgggcgcggcgcggggctttgtgcgctccgcagtgtgcgcgaggggagcgcggccgggggcggtgccccgcggtgcggggggggctgcgaggggaacaaaggctgcgtgcggggtgtgtgcgtgggggggtgagcagggggtgtgggcgcgtcggtcgggctgcaaccccccctgcacccccctccccgagttgctgagcacggcccggcttcgggtgcggggctccgtacggggcgtggcgcggggctcgccgtgccgggcggggggtggcggcaggtgggggtgccgggcggggcggggccgcctcgggccggggagggctcgggggaggggcgcggcggcccccggagcgccggcggctgtcgaggcgcggcgagccgcagccattgccttttatggtaatcgtgcgagagggcgcagggacttcctttgtcccaaatctgtgcggagccgaaatctgggaggcgccgccgcaccccctctagcgggcgcggggcgaagcggtgcggcgccggcaggaaggaaatgggcggggagggccttcgtgcgtcgccgcgccgccgtccccttctccctctccagcctcggggctgtccgcggggggacggctgccttcgggggggacggggcagggcggggttcggcttctggcgtgtgaccggcggctctagagcctctgctaaccatgttcatgccttcttctttttcctacaggcacctgtgattgcctcgggagttgaaatacacccagattgccaccatggtagagatgctgccaactgtcgctgtgctggtcttggcagtgtccgtggttgccaaggataacaccacgctgcaggaattcgccaccatggtgagcaagggcgaggagctgttcaccggggtggtgcccatcctggtcgagctggacggcgacgtaaacggccacaagttcagcgtgtccggcgagggcgagggcgatgccacctacggcaagctgaccctgaagttcatctgcaccaccggcaagctgcccgtgccctggcccaccctcgtgaccaccctgacctacggcgtgcagtgcttcagccgctaccccgaccacatgaagcagcacgacttcttcaagtccgccatgcccgaaggctacgtccaggagcgcaccatcttcttcaaggacgacggcaactacaagacccgcgccgaggtgaagttcgagggcgacaccctggtgaaccgcatcgagctgaagggcatcgacttcaaggaggacggcaacatcctggggcacaagctggagtacaactacaacagccacaacgtctatatcatggccgacaagcagaagaacggcatcaaggtgaacttcaagatccgccacaacatcgaggacggcagcgtgcagctcgccgaccactaccagcagaacacccccatcggcgacggccccgtgctgctgcccgacaaccactacctgagcacccagtccgccctgagcaaagaccccaacgagaagcgcgatcacatggtcctgctggagttcgtgaccgccgccgggatcactctcggcatggatgaactataccaactcgagaatggcggcataagcctgctggttcagaacacatcctggatgctgctgctgctgctttccctctccctcctccaagccctggacttcatttctctgtaattaccaatagtcggcggttatcagcggaccctacgaagttctgtgccttctagttgccagccatctgttgtttgcccctcccccgtgccttccttgaccctggaaggtgccactcccactgtcctttcctaataaaatgaggaaattgcatcgcattgtctgagtaggtgtcattctattctggggggtggggtggggcaggacagcaagggggaggattgggaagagaatagcaggcatgctggggagcggccgcaggaacccctagtgatggagttggccactccctctctgcgcgctcgctcgctcactgaggccgggcgaccaaaggtcgcccgacgcccgggctttgcccgggcggcctcagtgagcgagcgagcgcgcagctgcctgcagggcgatcgccctgaaaagtggataaccagcaccgttgtgagtgtctcctgggcgggagtcttctgggcaggcttaaaggctaacctggtgtgtgggcgttgtcctgcaggggaattgaacaggtgtaaaattggagggacaagacttcccacagattttcggttttgtcgggaagttttttaataggggcaaataaggaaaatgggaggataggtagtcatctggggttttatgcagcaaaactacaggttattattgcttgtgatccgcctcggagtattttccatcgaggtagattaaagacatgctcacccgagttttatactctcctgcttgagatccttactacagtatgaaattacagtgtcgcgagttagactatgtaagcagaattttaatcatttttaaagagcccagtacttcatatccatttctcccgctccttctgcagccttatcaaaaggtattttagaacactcattttagccccattttcatttattatactggcttatccaacccctagacagagcattggcattttccctttcctgatcttagaagtctgatgactcatgaaaccagacagattagttacatacaccacaaatcgaggctgtagctggggcctcaacactgcagttcttttataactccttagtacactttttgttgatcctttgccttgatccttaattttcagtgtctatcacctctcccgtcaggtggtgttccacatttgggcctattctcagtccagggagttttacaacaatagatgtattgagaatccaacctaaagcttaactttccactcccatgaatgcctctctcctttttctccatttataaactgagctattaaccattaatggtttccaggtggatgtctcctcccccaatattacctgatgtatcttacatattgccaggctgatattttaagacattaaaaggtatatttcattattgagccacatggtattgattactgcttactaaaattttgtcattgtacacatctgtaaaaggtggttccttttggaatgcaaagttcaggtgtttgttgtctttcctgacctaaggtcttgtgagcttgtattttttctatttaagcagtgctttctcttggactggcttgactcatggcattctacacgttattgctggtctaaatgtgattttgccaagcttcttcaggacctataattttgcttgacttgtagccaaacacaagtaaaatgattaagcaacaaatgtatttgtgaagcttggtttttaggttgttgtgttgtgtgtgcttgtgctctataataatactatccaggggctggagaggtggctcggagttcaagagcacagactgctcttccagaagtcctgagttcaattcccagcaaccacatggtggctcacaaccatctgtaatgggatctgatgccctcttctggtgtgtctgaagaccacaagtgtattcacattaaataaataaatcctccttcttcttcttttttttttttttaaagagaa

SEQ ID NO: 103 - DNA, 6224 bp, synthetic construct; identical to SEQ ID NO: 102
  source 1..6224: mol_type = other DNA

SEQ ID NO: 104 - DNA, 7556 bp, synthetic construct
  source 1..7556: mol_type = other DNA
cgggactagggctgcgtgagtctctgagcgcaggcgggcggcggccgcccctcccccggcggcggcagcggcggcagcggcggcagctcactcagcccgctgcccgagcggaaacgccactgaccgcacggggattcccagtgccggcgccaggggcacgcgggacacgccccctcccgccgcgccattggcctctccgcccaccgccccacacttattggccggtgcgccgccaatcagcggaggctgccggggccgcctaaagaagaggctgtgctttggggctccggctcctcagagagcctcggctaggtaggggatcgggactctggcgggagggcggcttggtgcgtttgcggggatgggcggccgcggcaggccctccgagcgtggtggagccgttctgtgagacagccgggtacgagtcgtgacgctggaaggggcaagcgggtggtgggcaggaatgcggtccgccctgcagcaaccggagggggagggagaagggagcggaaaagtctccaccggacgcggccatggctcgggggggggggggcagcggaggagcgcttccggccgacgtctcgtcgctgattggcttcttttcctcccgccgtgtgtgaaaacacaaatggcgtgttttggttggcgtaaggcgcctgtcagttaacggcagccggagtgcgcagccgccggcagcctcgctctgcccactgggtggggcgggaggtaggtggggtgaggcgagctggacgtgcgggcgcggtcggcctctggcggggcgggggaggggagggagggtcagcgaaagtagctcgcgcgcgagcggccgcccaccctccccttcctctgggggagtcgttttacccgccgccggccgggcctcgtcgtctgattggctctcggggcccagaaaactggcccttgccattggctcgtgttcgtgcaagttgagtccatccgccggccagcgggggcggcgaggaggcgctcccaggttccggccctcccctcggctccgcgccgcagagtctggccgcgcgcccctgcgcaacgtggcaggaagcgcgcgctgggggcggggacgggcagtagggctgagcggctgcggggcgggtgcaagcacgtttccgacttgagttgcctcaagaggggcgtgctgagccagacctccatcgcgcactccggggagtggagggaaggagcgagggctcagttgggctgttttggaggcaggaagcacttgctctcccaaagtcgctctgagttgttatcagtaagggagctgcagtggagtaggcggggagaaggccgcacccttctccggaggggggaggggagtgttgcaatacctttctgggagttctctgctgcctcctggcttctgaggaccgccctgggcctgggagaatcccttccccctcttccctcgtgatctgcaactccagtctttctagagatgttgcgactgtagagcgttgaccctgacacaatacttacgataacttcgtataatgtatgctatacgaagttatagtaattcatacaaaaggactcgcccctgccttggggaatcccagggaccgtcgttaaactcccactaacgtagaacccagaattcgatatcgccggctctgcggcctcttccgcgtcttcgccttcgccctcagacgagtcggatctccctttgggccgcctccccgcctgataacttcgtataatgtatgctatacgaagttatcgttacataacttacggtaaatggcccgcctggctgaccgcccaacgacccccgcccattgacgtcaataatgacgtatgttcccatagtaacgccaatagggactttccattgacgtcaatgggtggactatttacggtaaactgcccacttggcagtacatcaagtgtatcatatgccaagtacgccccctattgacgtcaatgacggtaaatggcccgcctggcattatgcccagtacatgaccttatgggactttcctacttggcagtacatctacgtattagtcatcgctattaccatgggtcgaggtgagccccacgttctgcttcactctccccatctcccccccctccccacccccaattttgtatttatttattttttaattattttgtgcagcgatgggggcggggggggggggggcgcgcgccaggcggggcggggcggggcgaggggcggggcggggcgaggcggagaggtgcggcggcagccaatcagagcggcgcgctccgaaagtttccttttatggcgaggcggcggcggcggcggccctataaaaagcgaagcgcgcggcgggcgggagtcgctgcgttgccttcgccccgtgccccgctccgcgccgcctcgcgccgcccgccccggctctgactgaccgcgttactcccacaggtgagcgggcgggacggcccttctcctccgggctgtaattagcgcttggtttaatgacggctcgtttcttttctgtggctgcgtgaaagccttaaagggctccgggagggccctttgtgcgggggggagcggctcggggggtgcgtgcgtgtgtgtgtgcgtggggagcgccgcgtgcggcccgcgctgcccggcggctgtgagcgctgcgggcgcggcgcggggctttgtgcgctccgcgtgtgcgcgaggggagcgcggccgggggcggtgccccgcggtgcgggggggctgcgaggggaacaaaggctgcgtgcggggtgtgtgcgtgggggggtgagcagggggtgtgggcgcggcggtcgggctgtaacccccccctgcacccccctccccgagttgctgagcacggcccggcttcgggtgcggggctccgtgcggggcgtggcgcggggctcgccgtgccgggcggggggtggcggcaggtgggggtgccgggcggggcggggccgcctcgggccggggagggctcgggggaggggcgcggcggccccggagcgccggcggctgtcgaggcgcggcgagccgcagccattgccttttatggtaatcgtgcgagagggcgcagggacttcctttgtcccaaatctggcggagccgaaatctgggaggcgccgccgcaccccctctagcgggcgcgggcgaagcggtgcggcgccggcaggaaggaaatgggcggggagggccttcgtgcgtcgccgcgccgccgtccccttctccatctccagcctcggggctgccgcagggggacggctgccttcgggggggacggggcagggcggggttcggcttctggcgtgtgaccggcggctctagagcctctgctaaccatgttcatgccttcttctttttcctacagctcctgggcaacgtgctggttattgtgctgtctcatcattttggcaaaggcacctgtgattgcctcgggagttgaaatacacccagattgccaccatggcctcaccgttgacccgctttctgtcgctgaacctgctgctgctgggtgagtcgattatcctggggagtggagaagctactagtatggatcaagtccaactggtggagtctggtggcgctttggtgcagccaggtggctctctgcgtttgtcctgtgccgcttctggcttcccagtgaaccgctattccatgcgctggtatcgccaggctccaggcaaagagcgtgagtgggtagccggtatgtccagcgcgggtgatcgtagctcctatgaagactccgtgaagggccgtttcaccatcagccgtgacgatgcccgtaacacggtgtatctgcaaatgaacagcttgaaacctgaagatacggccgtgtattactgtaatgtgaacgtgggcttcgagtattggggccaaggcacccaggtcaccgtctccagcactagtaagccacaggcacccgaactccgaatctttccaaagaaaatggacgccgaacttggtcagaaggtggacctggtatgtgaagtgttggggtccgtttcgcaaggatgctcttggctcttccagaactccagctccaaactcccccagcccaccttcgttgtctatatggcttcatcccacaacaagataacgtgggacgagaagctgaattcgtcgaaactgttttctgccatgagggacacgaataataagtacgttctcaccctgaacaagttcagcaaggaaaacgaaggctactatttctgctcagtcatcagcaactcggtgatgtacttcagttctgtcgtgccagtccttcagaaagtgaactctactactaccaagccagtgctgcgaactccctcacctgtgcaccctaccgggacatctcagccccagagaccagaagattgtcggccccgtggctcagtgaaggggaccggattggacttcgcctgtgatatttacatctgggcacccttggccggaatctgcgtggcccttctgctgtccttgatcatcactctcatctgctaccacagccgcggatccaccatggtgagcaagggcgaggaggataacatggccatcatcaaggagttcatgcgcttcaaggtgcacatggagggctccgtgaacggccacgagttcgagatcgagggcgagggcgagggccgcccctacgagggcacccagaccgccaagctgaaggtgaccaagggtggccccctgcccttcgcctgggacatcctgtcccctcagttcatgtacggctccaaggcctacgtgaagcaccccgccgacatccccgactacttgaagctgtccttccccgagggcttcaagtgggagcgcgtgatgaacttcgaggacggcggcgtggtgaccgtgacccaggactcctccctgcaggacggcgagttcatctacaaggtgaagctgcgcggcaccaacttcccctccgacggccccgtaatgcagaagaagaccatgggctgggaggcctcctccgagcggatgtaccccgaggacggcgccctgaagggcgagatcaagcagaggctgaagctgaaggacggcggccactacgacgctgaggtcaagaccacctacaaggccaagaagcccgtgcagctgcccggcgcctacaacgtcaacatcaagttggacatcacctcccacaacgaggactacaccatcgtggaacagtacgaacgcgccgagggccgccactccaccggcggcatggacgagctgtacaagtaattaccaatagtcggcggttatcagcggaccctacgaagttggagtaacgaccttgaagacgagtacagagttccggtttgaatcaacctctggattacaaaatttgtgaaagattgactggtattcttaactatgttgctccttttacgctatgtggatacgctgctttaatgcctttgtatcatgctattgcttcccgtatggctttcattttctcctccttgtataaatcctggttgctgtctctttatgaggagttgtggcccgttgtcaggcaacgtggcgtggtgtgcactgtgtttgctgacgcaacccccactggttggggcattgccaccacctgtcagctcctttccgggactttcgctttccccctccctattgccacggcggaactcatcgccgcctgccttgcccgctgctggacaggggctcggctgttgggcactgacaattccgtggtgttgtcctcgagtctagagggcccgtttaaacccgctgatcagcctcgactgtgccttctagttgccagccatctgttgtttgcccctcccccgtgccttccttgaccctggaaggtgccactcccactgtcctttcctaataaaatgaggaaattgcatcgcattgtctgagtaggtgtcattctattctggggggtggggtggggcaggacagcaagggggaggattgggaagacaatagcaggcatgctggggatgcggtgggctctatggctatgagttcgttccctccttgcctcctggtggtagatagccctacgggcgaccaaaggtcgcccgacgcccgggctttgcccgggcggcctcagtgagcgagcgagcgcgcagctgcctgcaggcctgaaaagtggataaccagcaccgttgtgagtgtctcctgggcgggagtcttctgggcaggcttaaaggctaacctggtgtgtgggcgttgtcctgcaggggaattgaacaggtgtaaaattggagggacaagacttcccacagattttcggttttgtcgggaagttttttaataggggcaaataaggaaaatgggaggataggtagtcatctggggttttatgcagcaaaactacaggttattattgcttgtgatccgcctcggagtattttccatcgaggtagattaaagacatgctcacccgagttttatactctcctgcttgagatccttactacagtatgaaattacagtgtcgcgagttagactatgtaagcagaattttaatcatttttaaagagcccagtacttcatatccatttctcccgctccttctgcagccttatcaaaaggtattttagaacactcattttagccccattttcatttattatactggcttatccaacccctagacagagcattggcattttccctttcctgatcttagaagtctgatgactcatgaaaccagacagattagttacatacaccacaaatcgaggctgtagctggggcctcaacactgcagttcttttataactccttagtacactttttgttgatcctttgccttgatccttaattttcagtgtctatcacctctcccgtcaggtggtgttccacatttgggcctattctcagtccagggagttttacaacaatagatgtattgagaatccaacctaaagcttaactttccactcccatgaatgcctctctcctttttctccatttataaactgagctattaaccattaatggtttccaggtggatgtctcctcccccaatattacctgatgtatcttacatattgccaggctgatattttaagacattaaaaggtatatttcattattgagccacatggtattgattactgcttactaaaattttgtcattgtacacatctgtaaaaggtggttccttttggaatgcaaagttcaggtgtttgttgtctttcctgacctaaggtcttgtgagcttgtattttttctatttaagcagtgctttctcttggactggcttgactcatggcattctacacgttattgctggtctaaatgtgattttgccaagcttcttcaggacctataattttgcttgacttgtagccaaacacaagtaaaatgattaagcaacaaatgtatttgtgaagcttggtttttaggttgttgtgttgtgtgtgcttgtgctctataataatactatccaggggctggagaggtggctcggagttcaagagcacagactgctcttccagaagtcctgagttcaattcccagcaaccacatggtggctcacaaccatctgtaatgggatctgatgccctcttctggtgtgtctgaagaccacaagtgtattcacattaaataaataaatcctccttcttcttcttttttttttttttaaagagaa

SEQ ID NO: 105 - DNA, 7305 bp, synthetic construct
  source 1..7305: mol_type = other DNA
cgggactagggctgcgtgagtctctgagcgcaggcgggcggcggccgcccctcccccggcggcggcagcggcggcagcggcggcagctcactcagcccgctgcccgagcggaaacgccactgaccgcacggggattcccagtgccggcgccaggggcacgcgggacacgccccctcccgccgcgccattggcctctccgcccaccgccccacacttattggccggtgcgccgccaatcagcggaggctgccggggccgcctaaagaagaggctgtgctttggggctccggctcctcagagagcctcggctaggtaggggatcgggactctggcgggagggcggcttggtgcgtttgcggggatgggcggccgcggcaggccctccgagcgtggtggagccgttctgtgagacagccgggtacgagtcgtgacgctggaaggggcaagcgggtggtgggcaggaatgcggtccgccctgcagcaaccggagggggagggagaagggagcggaaaagtctccaccggacgcggccatggctcgggggggggggggcagcggaggagcgcttccggccgacgtctcgtcgctgattggcttcttttcctcccgccgtgtgtgaaaacacaaatggcgtgttttggttggcgtaaggcgcctgtcagttaacggcagccggagtgcgcagccgccggcagcctcgctctgcccactgggtggggcgggaggtaggtggggtgaggcgagctggacgtgcgggcgcggtcggcctctggcggggcgggggaggggagggagggtcagcgaaagtagctcgcgcgcgagcggccgcccaccctccccttcctctgggggagtcgttttacccgccgccggccgggcctcgtcgtctgattggctctcggggcccagaaaactggcccttgccattggctcgtgttcgtgcaagttgagtccatccgccggccagcgggggcggcgaggaggcgctcccaggttccggccctcccctcggctccgcgccgcagagtctggccgcgcgcccctgcgcaacgtggcaggaagcgcgcgctgggggcggggacgggcagtagggctgagcggctgcggggcgggtgcaagcacgtttccgacttgagttgcctcaagaggggcgtgctgagccagacctccatcgcgcactccggggagtggagggaaggagcgagggctcagttgggctgttttggaggcaggaagcacttgctctcccaaagtcgctctgagttgttatcagtaagggagctgcagtggagtaggcggggagaaggccgcacccttctccggaggggggaggggagtgttgcaatacctttctgggagttctctgctgcctcctggcttctgaggaccgccctgggcctgggagaatcccttccccctcttccctcgtgatctgcaactccagtctttctagagatgttgcgactgtagagcgttgaccctgacacaatacttacgataacttcgtataatgtatgctatacgaagttatagtaattcatacaaaaggactcgcccctgccttggggaatcccagggaccgtcgttaaactcccactaacgtagaacccagaattcgatatcgccggctctgcggcctcttccgcgtcttcgccttcgccctcagacgagtcggatctccctttgggccgcctccccgcctgataacttcgtataatgtatgctatacgaagttatcgttacataacttacggtaaatggcccgcctggctgaccgcccaacgacccccgcccattgacgtcaataatgacgtatgttcccatagtaacgccaatagggactttccattgacgtcaatgggtggagtatttacggtaaactgcccacttggcagtacatcaagtgtatcatatgccaagtacgccccctattgacgtcaatgacggtaaatggcccgcctggcattatgcccagtacatgaccttatgggactttcctacttggcagtacatctacgtattagtcatcgctattaccatggtcgaggtgagccccacgttctgcttcactctccccatctcccccccctccccacccccaattttgtatttatttattttttaattattttgtgcagcgatgggggcggggggggggggggggcgcgcgccaggcggggcggggcggggcgaggggcggggcggggcgaggcggagaggtgcggcggcagccaatcagagcggcgcgctccgaaagtttccttttatggcgaggcggcggcggcggcggccctataaaaagcgaagcgcgcggcgggcggggagtcgctgcgacgctgccttcgccccgtgccccgctccgccgccgcctcgcgccgcccgccccggctctgactgaccgcgttactcccacaggtgagcgggcgggacggcccttctcctccgggctgtaattagcgcttggtttaatgacggcttgtttcttttctgtggctgcgtgaaagccttgaggggctccgggagggccctttgtgcggggggagcggctcggggggtgcgtgcgtgtgtgtgtgcgtggggagcgccgcgtgcggctccgcgctgcccggcggctgtgagcgctgcgggcgcggcgcggggctttgtgcgctccgcagtgtgcgcgaggggagcgcggccgggggcggtgccccgcggtgcggggggggctgcgaggggaacaaaggctgcgtgcggggtgtgtgcgtgggggggtgagcagggggtgtgggcgcgtcggtcgggctgcaaccccccctgcacccccctccccgagttgctgagcacggcccggcttcgggtgcggggctccgtacggggcgtggcgcggggctcgccgtgccgggcggggggtggcggcaggtgggggtgccgggcggggcggggccgcctcgggccggggagggctcgggggaggggcgcggcggcccccggagcgccggcggctgtcgaggcgcggcgagccgcagccattgccttttatggtaatcgtgcgagagggcgcagggacttcctttgtcccaaatctgtgcggagccgaaatctgggaggcgccgccgcaccccctctagcgggcgcggggcgaagcggtgcggcgccggcaggaaggaaatgggcggggagggccttcgtgcgtcgccgcgccgccgtccccttctccctctccagcctcggggctgtccgcggggggacggctgccttcgggggggacggggcagggcggggttcggcttctggcgtgtgaccggcggctctagagcctctgctaaccatgttcatgccttcttctttttcctacaggcacctgtgattgcctcgggagttgaaatacacccagattgccaccatgagatctgatccaaaaaagaagagaaaggtagatccaaaaaagaagagaaaggtagatccaaaaaagaagagaaaggtcatggtgagcgtgatcaagcccgagatgaagatgaggtactacatggacggctccgtcaatgggcatgagttcacaatcgagggtgagggcacaggcagaccttacgagggacatcaggagatgacactgcgcgtcacaatggccaagggcgggccaatgcctttcgccttcgacctggtgtcccacgtgttctgttacggccacagaccttttactaaatatccagaagagatcccagactatttcaagcaggcctttcctgagggcctgtcctgggagaggtccctggagttcgaggacggcggctccgcctccgtgagcgcccacatcagcctgaggggcaacaccttctaccacaagtccaagttcaccggcgtgaacttccccgccgacggccccatcatgcagaaccagagcgtggactgggagccctccaccgagaagatcaccgccagcgacggcgtgctgaagggcgacgtgaccatgtacctgaagctggagggcggcggcaaccacaagtgccagttcaagaccacctacaaggccgccaagaagatcctgaagatgcccggcagccactacatcagccacaggctggtgaggaagaccgagggcaacatcaccgagctggtggaggacgccgtggcccactccgccacgaacttctctctgttaaagcaagcaggagacgtggaagaaaaccccggtcctatgaccgagtacaagcccacggtgcgcctcgccacccgcgacgacgtccccagggccgtacgcaccctcgccgccgcgttcgccgactaccccgccacgcgccacaccgtcgatccggaccgccacatcgagcgggtcaccgagctgcaagaactcttcctcacgcgcgtcgggctcgacatcggcaaggtgtgggtcgcggacgacggcgccgcggtggcggtctggaccacgccggagagcgtcgaagcgggggcggtgttcgccgagatcggcccgcgcatggccgagttgagcggttcccggctggccgcgcagcaacagatggaaggcctcctggcgccgcaccggcccaaggagcccgcgtggttcctggccaccgtcggagtctcgcccgaccaccagggcaagggtctgggcagcgccgtcgtgctccccggagtggaggcggccgagcgcgccggggtgcccgccttcctggagacctccgcgccccgcaacctccccttctacgagcggctcggcttcaccgtcaccgccgacgtcgaggtgcccgaaggaccgcgcacctggtgcatgacccgcaagcccggtgccgggtccggaggagagggcagaggaagtctcctaacatgcggtgacgtggaggagaatcctggcccaatggtagagatgctgccaactgtcgctgtgctggtcttggcagtgtccgtggttgccaaggataacaccacgctgcaggaattcgccaccatgcaggttcaactggtggaaagcggcggtgctctggtacaaccgggcggtagtctgcgcctgagctgtgccgcaagcggtttcccagtcaaccgctactctatgcgttggtatcgccaggcgcctggtaaagaacgtgaatgggttgccggcatgagcagtgcgggcgatcgttctagttacgaggactctgttaaaggtcgttttacaattagccgtgatgatgcgcgcaataccgtgtatctgcaaatgaacagtctgaagccggaggacaccgcagtatattattgcaatgtcaacgtggggtttgaatattggggccaggggactcaggtgacggtgagctctcaactcgagaatggcggcataagcctgctggttcagaacacatcctggatgctgctgctgctgctttccctctccctcctccaagccctggacttcatttctctgtaattaccaatagtcggcggttatcagcggaccctacgaagttctgtgccttctagttgccagccatctgttgtttgcccctcccccgtgccttccttgaccctggaaggtgccactcccactgtcctttcctaataaaatgaggaaattgcatcgcattgtctgagtaggtgtcattctattctggggggtggggtggggcaggacagcaagggggaggattgggaagagaatagcaggcatgctggggagcggccgcaggaacccctagtgatggagttggccactccctctctgcgcgctcgctcgctcactgaggccgggcgaccaaaggtcgcccgacgcccgggctttgcccgggcggcctcagtgagcgagcgagcgcgcagctgcctgcaggcctgaaaagtggataaccagcaccgttgtgagtgtctcctgggcgggagtcttctgggcaggcttaaaggctaacctggtgtgtgggcgttgtcctgcaggggaattgaacaggtgtaaaattggagggacaagacttcccacagattttcggttttgtcgggaagttttttaataggggcaaataaggaaaatgggaggataggtagtcatctggggttttatgcagcaaaactacaggttattattgcttgtgatccgcctcggagtattttccatcgaggtagattaaagacatgctcacccgagttttatactctcctgcttgagatccttactacagtatgaaattacagtgtcgcgagttagactatgtaagcagaattttaatcatttttaaagagcccagtacttcatatccatttctcccgctccttctgcagccttatcaaaaggtattttagaacactcattttagccccattttcatttattatactggcttatccaacccctagacagagcattggcattttccctttcctgatcttagaagtctgatgactcatgaaaccagacagattagttacatacaccacaaatcgaggctgtagctggggcctcaacactgcagttcttttataactccttagtacactttttgttgatcctttgccttgatccttaattttcagtgtctatcacctctcccgtcaggtggtgttccacatttgggcctattctcagtccagggagttttacaacaatagatgtattgagaatccaacctaaagcttaactttccactcccatgaatgcctctctcctttttctccatttataaactgagctattaaccattaatggtttccaggtggatgtctcctcccccaatattacctgatgtatcttacatattgccaggctgatattttaagacattaaaaggtatatttcattattgagccacatggtattgattactgcttactaaaattttgtcattgtacacatctgtaaaaggtggttccttttggaatgcaaagttcaggtgtttgttgtctttcctgacctaaggtcttgtgagcttgtattttttctatttaagcagtgctttctcttggactggcttgactcatggcattctacacgttattgctggtctaaatgtgattttgccaagcttcttcaggacctataattttgcttgacttgtagccaaacacaagtaaaatgattaagcaacaaatgtatttgtgaagcttggtttttaggttgttgtgttgtgtgtgcttgtgctctataataatactatccaggggctggagaggtggctcggagttcaagagcacagactgctcttccagaagtcctgagttcaattcccagcaaccacatggtggctcacaaccatctgtaatgggatctgatgccctcttctggtgtgtctgaagaccacaagtgtattcacattaaataaataaatcctccttcttcttcttttttttttttttaaagagaa

SEQ ID NO: 106 - DNA, 7266 bp, synthetic construct
  source 1..7266: mol_type = other DNA
ccctctagcgggcgcgggcgaagcggtgcggcgccggcaggaaggaaatgggcggggagggccttcgtgcgtcgccgcgccgccgtccccttctccatctccagcctcggggctgccgcagggggacggctgccttcgggggggacggggcagggcggggttcggcttctggcgtgtgaccggcggctctagagcctctgctaaccatgttcatgccttcttctttttcctacagctcctgggcaacgtgctggttattgtgctgtctcatcattttggcaaaggcacctgtgattgcctcgggagttgaaatacacccagattgccaccatgaccgagtacaagcccacggtgcgcctcgccacccgcgacgacgtccccagggccgtacgcaccctcgccgccgcgttcgccgactaccccgccacgcgccacaccgtcgatccggaccgccacatcgagcgggtcaccgagctgcaagaactcttcctcacgcgcgtcgggctcgacatcggcaaggtgtgggtcgcggacgacggcgccgcggtggcggtctggaccacgccggagagcgtcgaagcgggggcggtgttcgccgagatcggcccgcgcatggccgagttgagcggttcccggctggccgcgcagcaacagatggaaggcctcctggcgccgcaccggcccaaggagcccgcgtggttcctggccaccgtcggcgtctcgcccgaccaccagggcaagggtctgggcagcgccgtcgtgctccccggagtggaggcggccgagcgcgccggggtgcccgccttcctggagacctccgcgccccgcaacctccccttctacgagcggctcggcttcaccgtcaccgccgacgtcgaggtgcccgaaggaccgcgcacctggtgcatgacccgcaagcccggtgccggcggcgggtccggaggagagggcagaggaagtctcctaacatgcggtgacgtggaggagaatcctggcccaatggcctctactggtctgcaaatcttggggatcgtcctgaccctgcttggctgggtcaacgccctggtgtcctgtgccctgcccatgtggaaggtgaccgccttcatcggcaacatgcaggttcaactggtggaaagcggcggtgctctggtacaaccgggcggtagtctgcgcctgagctgtgccgcaagcggtttcccagtcaaccgctactctatgcgttggtatcgccaggcgcctggtaaagaacgtgaatgggttgccggcatgagcagtgcgggcgatcgttctagttacgaggactctgttaaaggtcgttttacaattagccgtgatgatgcgcgcaataccgtgtatctgcaaatgaacagtctgaagccggaggacaccgcagtatattattgcaatgtcaacgtggggtttgaatattggggccaggggactcaggtgacggtgagctcttgattaccaatagtcggcggttatcagcggaccctacgaagttggagtaacgaccttgaagacgagtacagagttccggtttgaatcaacctctggattacaaaatttgtgaaagattgactggtattcttaactatgttgctccttttacgctatgtggatacgctgctttaatgcctttgtatcatgctattgcttcccgtatggctttcattttctcctccttgtataaatcctggttgctgtctctttatgaggagttgtggcccgttgtcaggcaacgtggcgtggtgtgcactgtgtttgctgacgcaacccccactggttggggcattgccaccacctgtcagctcctttccgggactttcgctttccccctccctattgccacggcggaactcatcgccgcctgccttgcccgctgctggacaggggctcggctgttgggcactgacaattccgtggtgttgtcctcgagtctagagggcccgtttaaacccgctgatcagcctcgactgtgccttctagttgccagccatctgttgtttgcccctcccccgtgccttccttgaccctggaaggtgccactcccactgtcctttcctaataaaatgaggaaattgcatcgcattgtctgagtaggtgtcattctattctggggggtggggtggggcaggacagcaagggggaggattgggaagacaatagcaggcatgctggggatgcggtgggctctatggctatgagttcgttccctccttgcctcctggtggtagatagttctccaaccgaagtgtttacggaagatagagcccgctgttagccctgagtctgcgttgtaagagcaataggtccactacgcgatcgcgcttttaccacgaacgataataggttggcgggtcactccaaaaagggtcgtgcggcgatactacaatctcctgttactcgtagggataacagggtaatcctgaaaagtggataaccagcaccgttgtgagtgtctcctagacgtcaggtggcacttttcggggaaatgtgcgcggaacccctatttgtttatttttctaaatacattcaaatatgtatccgctcatgagacaataaccctgataaatgcttcaataatattgaaaaaggaagagtatgagtattcaacatttccgtgtcgcccttattcccttttttgcggcattttgccttcctgtttttgctcacccagaaacgctggtgaaagtaaaagatgctgaagatcagttgggtgcacgagtgggttacatcgaactggatctcaacagcggtaagatccttgagagttttcgccccgaagaacgttttccaatgatgagcacttttaaagttctgctatgtggcgcggtattatcccgtgttgacgccgggcaagagcaactcggtcgccgcatacactattctcagaatgacttggttgagtactcaccagtcacagaaaagcatcttacggatggcatgacagtaagagaattatgcagtgctgccataaccatgagtgataacactgcggccaacttacttctgacaacgatcggaggaccgaaggagctaaccgcttttttgcacaacatgggggatcatgtaactcgccttgatcgttgggaaccggagctgaatgaagccataccaaacgacgagcgtgacaccacgatgcctgcagcaatggcaacaacgttgcgcaaactattaactggcgaactacttactctagcttcccggcaacaattaatagactggatggaggcggataaagttgcaggaccacttctgcgctcggcccttccggctggctggtttattgctgataaatctggagccggtgagcgtgggtctcgcggtatcattgcagcactggggccagatggtaagccctcccgtatcgtagttatctacacgacggggagtcaggcaactatggatgaacgaaatagacagatcgctgagataggtgcctcactgattaagcattggtaactgtcagaccaagtttactcatatatactttagacgcagtccctgtcctgagtagtaaacttccgaatagagtgattctgacaccgtgagtaagcacaggtcgggtcttcaatcatcgtctacggattgggacaccgaggtttctgaactcaacatgatcgtgctcctgtcgttgaggacccggctaggctggcggggttgccttactggttagcagaatgaatcaccgatacgcgagcgaacgtgaagcgactgctgctgcaaaacgtctgcgacctgagcaacaacatgaatggtcttcggtttccgtgtttcgtaaagtctggaaacgcggaagtcagcgccctgcaccattatgttccggatctgcatcgcaggatgctgctggctaccctgtggaacacctacatctgtattaacgaagcgctggcattgaccctgagtgatttttctctggtcccgccgcatccataccgccagttgtttaccctcacaacgttccagtaaccgggcatgttcatcatcagtaacccgtatcgtgagcatcctctctcgtttcatcggtatcattacccccatgaacagaaatcccccttacacggaggcatcagtgaccaaacaggaaaaaaccgcccttaacatggcccgctttatcagaagccagacattaacgcttctggagaaactcaacgagctggacgcggatgaacaggcagacatctgtgaatcgcttcacgaccacgctgatgagctttaccgcagctgcctcgcgcgtttcggtgatgacggtgaaaacctctgacacatgcagctcccggagacggtcacagcttgtctgtaagcggatgccgggagcagacaagcccgtcagggcgcgtcagcgggtgttggcgggtgtcggggcgcagccatgacccagtcacgtagcgatagcggagtgtatactggcttaactatgcggcatcagagcagattgtactgagagtgcaccatatgcggtgtgaaataccgcacagatgcgtaaggagaaaataccgcatcaggcgctcttccgcttcctcgctcactgactcgctgcgctcggtcgttcggctgcggcgagcggtatcagctcactcaaaggcggtaatacggttatccacagaatcaggggataacgcaggaaagaacatgtgagcaaaaggccagcaaaaggccaggaaccgtaaaaaggccgcgttgctggcgtttttccataggctccgcccccctgacgagcatcacaaaaatcgacgctcaagtcagaggtggcgaaacccgacaggactataaagataccaggcgtttccccctggaagctccctcgtgcgctctcctgttccgaccctgccgcttaccggatacctgtccgcctttctcccttcgggaagcgtggcgctttctcatagctcacgctgtaggtatctcagttcggtgtaggtcgttcgctccaagctgggctgtgtgcacgaaccccccgttcagcccgaccgctgcgccttatccggtaactatcgtcttgagtccaacccggtaagacacgacttatcgccactggcagcagccactggtaacaggattagcagagcgaggtatgtaggcggtgctacagagttcttgaagtggtggcctaactacggctacactagaaggacagtatttggtatctgcgctctgctgaagccagttaccttcggaaaaagagttggtagctcttgatccggcaaacaaaccaccgctggtagcggtggtttttttgtttgcaagcagcagattacgcgcagaaaaaaaggatctcaagaagatcctttgatcttttctacggggtctgacgctcagtggaacgaaaactcacgttaagggattttggtcatgagattatcaaaaaggatcttcacctagatccttttaaattaaaaatgaagttttaaatcaagttgcgactgtagagcgttgaccctgacacaatacttacgattaccctgttatccctacgctaccttcggtgaaagtgagtcggcacaatctcgtaatgtgaacactgcttcgccacttattgatagtcgcaacgggagcgatcgctaaaagcagcgattcgtggctcagtcccagagtcgtatctagctagtcaggtagtaaaaggtctcaactaggcagtggcagagcaggattcaaattcagggctgttgtgatgcctccgcagactctgagcgccacctggtggtaatttgtctgtgcctcttctgacgtggaagaacagcaactaacacactaacacggcatttactatgggccagccattgttctaaagccctcgttcacagagaaagttcggttacactgcggatttcgacattgattattgactagttattaatagtaatcaattacggggtcattagttcatagcccatatatggagttccgcgttacataacttacggtaaatggcccgcctggctgaccgcccaacgacccccgcccattgacgtcaataatgacgtatgttcccatagtaacgccaatagggactttccattgacgtcaatgggtggactatttacggtaaactgcccacttggcagtacatcaagtgtatcatatgccaagtacgccccctattgacgtcaatgacggtaaatggcccgcctggcattatgcccagtacatgaccttatgggactttcctacttggcagtacatctacgtattagtcatcgctattaccatgggtcgaggtgagccccacgttctgcttcactctccccatctcccccccctccccacccccaattttgtatttatttattttttaattattttgtgcagcgatgggggcggggggggggggggcgcgcgccaggcggggcggggcggggcgaggggcggggcggggcgaggcggagaggtgcggcggcagccaatcagagcggcgcgctccgaaagtttccttttatggcgaggcggcggcggcggcggccctataaaaagcgaagcgcgcggcgggcgggagtcgctgcgttgccttcgccccgtgccccgctccgcgccgcctcgcgccgcccgccccggctctgactgaccgcgttactcccacaggtgagcgggcgggacggcccttctcctccgggctgtaattagcgcttggtttaatgacggctcgtttcttttctgtggctgcgtgaaagccttaaagggctccgggagggccctttgtgcgggggggagcggctcggggggtgcgtgcgtgtgtgtgtgcgtggggagcgccgcgtgcggcccgcgctgcccggcggctgtgagcgctgcgggcgcggcgcggggctttgtgcgctccgcgtgtgcgcgaggggagcgcggccgggggcggtgccccgcggtgcgggggggctgcgaggggaacaaaggctgcgtgcggggtgtgtgcgtgggggggtgagcagggggtgtgggcgcggcggtcgggctgtaacccccccctgcacccccctccccgagttgctgagcacggcccggcttcgggtgcggggctccgtgcggggcgtggcgcggggctcgccgtgccgggcggggggtggcggcaggtgggggtgccgggcggggcggggccgcctcgggccggggagggctcgggggaggggcgcggcggccccggagcgccggcggctgtcgaggcgcggcgagccgcagccattgccttttatggtaatcgtgcgagagggcgcagggacttcctttgtcccaaatctggcggagccgaaatctgggaggcgccgccgcacc

SEQ ID NO: 107 - DNA, 6115 bp, synthetic construct
  source 1..6115: mol_type = other DNA
aatgggtggagtatttacggtaaactgcccacttggcagtacatcaagtgtatcatatgccaagtacgccccctattgacgtcaatgacggtaaatggcccgcctggcattatgcccagtacatgaccttatgggactttcctacttggcagtacatctacgtattagtcatcgctattaccatggtcgaggtgagccccacgttctgcttcactctccccatctcccccccctccccacccccaattttgtatttatttattttttaattattttgtgcagcgatgggggcgggggggggcgaggcggagaggtgcggcggcagccaatcagagcggcgcgctccgaaagtttccttttatggcgaggcggcggcggcggcggccctataaaaagcgaagcgcgcggcgggcgggagtcgctgcgcgctgccttcgccccgtgccccgctccgccgccgcctcgcgccgcccgccccggctctgactgaccgcgttactcccacaggtgagcgggcgggacggcccttctcctccgggctgtaattagcgcttggtttaatgacggcttgtttcttttctgtggctgcgtgaaagccttgaggggctccgggagggccctttgtgcggggggagcggctcggggggtgcgtgcgtgtgtgtgtgcgtggggagcgccgcgtgcggctccgcgctgcccggcggctgtgagcgctgcgggcgcggcgcggggctttgtgcgctccgcagtgtgcgcgaggggagcgcggccgggggcggtgccccgcggtgcggggggggctgcgaggggaacaaaggctgcgtgcggggtgtgtgcgtgggggggtgagcagggggtgtgggcgcgtcggtcgggctgcaaccccccctgcacccccctccccgagttgctgagcacggcccggcttcgggtgcggggctccgtacggggcgtggcgcggggctcgccgtgccgggcggggggtggcggcaggtgggggtgccgggcggggcggggccgcctcgggccggggagggctcgggggaggggcgcggcggcccccggagcgccggcggctgtcgaggcgcggcgagccgcagccattgccttttatggtaatcgtgcgagagggcgcagggacttcctttgtcccaaatctgtgcggagccgaaatctgggaggcgccgccgcaccccctctagcgggcgcggggcgaagcggtgcggcgccggcaggaaggaaatgggcggggagggccttcgtgcgtcgccgcgccgccgtccccttctccctctccagcctcggggctgtccgcggggggacggctgccttcgggggggacggggcagggcggggttcggcttctggcgtgtgaccggcggctctagagcctctgctaaccatgttcatgccttcttctttttcctacagctcctgggcaacgtgctggttattgtgctgtctcatcattttggcaaagaagtaccgagctcggatccactagtaacggccgccagtgtgctggaattcgccaccatgaccgagtacaagcccacggtgcgcctcgccacccgcgacgacgtccccagggccgtacgcaccctcgccgccgcgttcgccgactaccccgccacgcgccacaccgtcgatccggaccgccacatcgagcgggtcaccgagctgcaagaactcttcctcacgcgcgtcgggctcgacatcggcaaggtgtgggtcgcggacgacggcgccgcggtggcggtctggaccacgccggagagcgtcgaagcgggggcggtgttcgccgagatcggcccgcgcatggccgagttgagcggttcccggctggccgcgcagcaacagatggaaggcctcctggcgccgcaccggcccaaggagcccgcgtggttcctggccaccgtcggcgtctcgcccgaccaccagggcaagggtctgggcagcgccgtcgtgctccccggagtggaggcggccgagcgcgccggggtgcccgccttcctggagacctccgcgccccgcaacctccccttctacgagcggctcggcttcaccgtcaccgccgacgtcgaggtgcccgaaggaccgcgcacctggtgcatgacccgcaagcccggtgccggcggcgggtccggaggagagggcagaggaagtctcctaacatgcggtgacgtggaggagaatcctggcccaatggtagagatgctgccaactgtcgctgtgctggtcttggcagtgtccgtggttgccaaggataacaccacgctgcaggaattcgccaccatgcaggttcaactggtggaaagcggcggtgctctggtacaaccgggcggtagtctgcgcctgagctgtgccgcaagcggtttcccagtcaaccgctactctatgcgttggtatcgccaggcgcctggtaaagaacgtgaatgggttgccggcatgagcagtgcgggcgatcgttctagttacgaggactctgttaaaggtcgttttacaattagccgtgatgatgcgcgcaataccgtgtatctgcaaatgaacagtctgaagccggaggacaccgcagtatattattgcaatgtcaacgtggggtttgaatattggggccaggggactcaggtgacggtgagctcttctggaggatctagcggaggatcctctggcagcgagacaccaggaacaagcgagtcagcaacaccagagagcagtggcggcagcagcggcggcagcagccaactcgagaatggcggcataagcctgctggttcagaacacatcctggatgctgctgctgctgctttccctctccctcctccaagccctggacttcatttctctgtaagcggcaattcactcctcaggtgcaggctgcctatcagaaggtggtggctggtgtggccaatgccctggctcacaaataccactgagatctttttccctctgccaaaaattatggggacatcatgaagccccttgagcatctgacttctggctaataaaggaaatttattttcattgcaatagtgtgttggaattttttgtgtctctcactcggaaggacatatgggagggcaaatcatttaaaacatcagaatgagtatttggtttagagtttggcaacatatgcccatatgctggctgccatgaacaaaggttggctataaagaggtcatcagtatatgaaacagccccctgctgtccattccttattccatagaaaagccttgacttgaggttagattttttttatattttgttttgtgttatttttttctttaacatccctaaaattttccttacatgttttactagccagatttttcctcctctcctgactactcccagtcatagctgtccctcttctcttatggagatccctcgacctgcagcccaagcttggcgtaatcatggtcatagctgtttcctgtgtgaaattgttatccgctcacaattccacacaacatacgagccggaagcataaagtgtaaagcctggggtgcctaatgagtgagctaactcacattaattgcgttgcgctcactgcccgctttccagtcgggaaacctgtcgtgccagcggatccgcatctcaattagtcagcaaccatagtcccgcccctaactccgcccatcccgcccctaactccgcccagttccgcccattctccgccccatggctgactaattttttttatttatgcagaggccgaggccgcctcggcctctgagctattccagaagtagtgaggaggcttttttggaggcctaggcttttgcaaaaagctaacttgtttattgcagcttataatggttacaaataaagcaatagcatcacaaatttcacaaataaagcatttttttcactgcattctagttgtggtttgtccaaactcatcaatgtatcttatcatgtctggatccgctgcattaatgaatcggccaacgcgcggggagaggcggtttgcgtattgggcgctcttccgcttcctcgctcactgactcgctgcgctcggtcgttcggctgcggcgagcggtatcagctcactcaaaggcggtaatacggttatccacagaatcaggggataacgcaggaaagaacatgtgagcaaaaggccagcaaaaggccaggaaccgtaaaaaggccgcgttgctggcgtttttccataggctccgcccccctgacgagcatcacaaaaatcgacgctcaagtcagaggtggcgaaacccgacaggactataaagataccaggcgtttccccctggaagctccctcgtgcgctctcctgttccgaccctgccgcttaccggatacctgtccgcctttctcccttcgggaagcgtggcgctttctcatagctcacgctgtaggtatctcagttcggtgtaggtcgttcgctccaagctgggctgtgtgcacgaaccccccgttcagcccgaccgctgcgccttatccggtaactatcgtcttgagtccaacccggtaagacacgacttatcgccactggcagcagccactggtaacaggattagcagagcgaggtatgtaggcggtgctacagagttcttgaagtggtggcctaactacggctacactagaagaacagtatttggtatctgcgctctgctgaagccagttaccttcggaaaaagagttggtagctcttgatccggcaaacaaaccaccgctggtagcggtggtttttttgtttgcaagcagcagattacgcgcagaaaaaaaggatctcaagaagatcctttgatcttttctacggggtctgacgctcagtggaacgaaaactcacgttaagggattttggtcatgagattatcaaaaaggatcttcacctagatccttttaaattaaaaatgaagttttaaatcaatctaaagtatatatgagtaaacttggtctgacagttaccaatgcttaatcagtgaggcacctatctcagcgatctgtctatttcgttcatccatagttgcctgactccccgtcgtgtagataactacgatacgggagggcttaccatctggccccagtgctgcaatgataccgcgagacccacgctcaccggctccagatttatcagcaataaaccagccagccggaagggccgagcgcagaagtggtcctgcaactttatccgcctccatccagtctattaattgttgccgggaagctagagtaagtagttcgccagttaatagtttgcgcaacgttgttgccattgctacaggcatcgtggtgtcacgctcgtcgtttggtatggcttcattcagctccggttcccaacgatcaaggcgagttacatgatcccccatgttgtgcaaaaaagcggttagctccttcggtcctccgatcgttgtcagaagtaagttggccgcagtgttatcactcatggttatggcagcactgcataattctcttactgtcatgccatccgtaagatgcttttctgtgactggtgagtactcaaccaagtcattctgagaatagtgtatgcggcgaccgagttgctcttgcccggcgtcaatacgggataataccgcgccacatagcagaactttaaaagtgctcatcattggaaaacgttcttcggggcgaaaactctcaaggatcttaccgctgttgagatccagttcgatgtaacccactcgtgcacccaactgatcttcagcatcttttactttcaccagcgtttctgggtgagcaaaaacaggaaggcaaaatgccgcaaaaaagggaataagggcgacacggaaatgttgaatactcatactcttcctttttcaatattattgaagcatttatcagggttattgtctcatgagcggatacatatttgaatgtatttagaaaaataaacaaataggggttccgcgcacatttccccgaaaagtgccacctgggtcgacattgattattgactagttattaatagtaatcaattacggggtcattagttcatagcccatatatggagttccgcgttacataacttacggtaaatggcccgcctggctgaccgcccaacgacccccgcccattgacgtcaataatgacgtatgttcccatagtaacgccaatagggactttccattgacgtc

SEQ ID NO: 108 - DNA, 8268 bp, synthetic construct
  source 1..8268: mol_type = other DNA
gtacagtgcgttctccagggagaagccttgctgacacaggaacgcgagctgattttccagggtttcgtactgtttctctgttgggcgggtgccgagatgcactttagccccgtcgcgatgtgagaggagagcacagcggaatgacttggcgttgttccgcagaaagtcttgccatgactcgccttccagggggcagaagtgggtatgatgcctgtccagcatctcgattggcagggcatcgagcagggcccgcttgttcttcacgtgccagtacagggtaggctgctcaactcccagcttttgagcgagtttccttgtcgtcaggccttcgataccgactccattgagtaattccagagcgccgtttatgactttgctcttgtccagtctagacatggggtttagttcctcaccttgtcgtattatactatgccgatatactatgccgatgattaattgtcaacacggtccggtctaacaaaaaagccaaaaacggccagaatttagcggacaatttactagtctaacactgaaaattacatattgacccaaatgattacatttcaaaaggtgcctaaaaaacttcacaaaacacactcgccaaccccgagcgcatagttcaaaaccggagcttcagctacttaagaagataggtacataaaaccgaccaaagaaactgacgcctcacttatccctcccctcaccagaggtccggcgcctgtcgattcaggagagcctaccctaggcccgaaccctgcgtcctgcgacggagaaaagcctaccgcacacctaccggcaggtggccccaccctgcattataagccaacagaacgggtgacgtcacgacacgacgagggcgcgcgctcccaaaggtacgggtgcactgcccaacggcaccgccataactgccgcccccgcaacagacgacaaaccgagttctccagtcagtgacaaacttcacgtcagggtccccagatggtgccccagcccatctcacccgaataagagctttcccgcattagcgaaggcctcaagaccttgggttcttgccgcccaccatgccccccaccttgtttcaacgacctcacagcccgcctcacaagcgtcttccattcaagactcgggaacagccgccattttgctgcgctccccccaacccccagttcagggcaaccttgctcgcggacccagactacagcccttggcggtctctccacacgcttccgtcccaccgagcggcccggcggccacgaaagccccggccagcccagcagcccgctactcaccaagtgacgatcacagcgatccacaaacaagaaccgcgacccaaatcccggctgcgacggaactagctgtgccacacccggcgcgtccttatataatcatcggcgttcaccgccccacggagatccctccgcagaatcgccgagaagggactacttttcctcgcctgttccgctctctggaaagaaaaccagtgccctagagtcacccaagtcccgtcctaaaatgtccttctgctgatactggggttctaaggccgagtcttatgagcagcgggccgctgtcctgagcgtccgggcggaaggatcaggacgctcgtgcgcccttcgtctgacgtggcagcgctcgccgtgaggagggggcgcccgcggggggcgccaaaacccggcgcggaggccagatctcccgatctcgagtttactccctatcagtgatagagaacgtatgtcgagtttactccctatcagtgatagagaacgatgtcgagtttactccctatcagtgatagagaacgtatgtcgagtttactccctatcagtgatagagaacgtatgtcgagtttactccctatcagtgatagagaacgtatgtcgagtttatccctatcagtgatagagaacgtatgtcgagtttactccctatcagtgatagagaacgtatgtcgaggtaggcgtgtacggtgggaggcctatataagcagagctcgtttagtgaaccgtcagatcgcctggagaattcgagctcggtacccggggatctggggatctggagctctcgagaattctcacgcgtcaagtggagcaaggcaggtggacagtggatcgccgccaccatggagaccgacaccctcttgctctgggtcctgctgctgtgggttccgggtagtaccggagacactagtatggatcaagtccaactggtggagtctggtggcgctttggtgcagccaggtggctctctgcgtttgtcctgtgccgcttctggcttcccagtgaaccgctattccatgcgctggtatcgccaggctccaggcaaagagcgtgagtgggtagccggtatgtccagcgcgggtgatcgtagctcctatgaagactccgtgaagggccgtttcaccatcagccgtgacgatgcccgtaacacggtgtatctgcaaatgaacagcttgaaacctgaagatacggccgtgtattactgtaatgtgaacgtgggcttcgagtattggggccaaggcacccaggtcaccgtctccagcactagtaacgccgtgggccaggatacgcaggaggtgatcgtcgtgccccacagcttgcccttcaaggtcgtggttattagtgctatcctggcgttggtggtgctgactattatctcccttatcatacttatcatgctgtggcaaaaaaaaccccgacgcggatccaccatggtgagcaagggcgaggaggataacatggccatcatcaaggagttcatgcgcttcaaggtgcacatggagggctccgtgaacggccacgagttcgagatcgagggcgagggcgagggccgcccctacgagggcacccagaccgccaagctgaaggtgaccaagggtggccccctgcccttcgcctgggacatcctgtcccctcagttcatgtacggctccaaggcctacgtgaagcaccccgccgacatccccgactacttgaagctgtccttccccgagggcttcaagtgggagcgcgtgatgaacttcgaggacggcggcgtggtgaccgtgacccaggactcctccctgcaggacggcgagttcatctacaaggtgaagctgcgcggcaccaacttcccctccgacggccccgtaatgcagaagaagaccatgggctgggaggcctcctccgagcggatgtaccccgaggacggcgccctgaagggcgagatcaagcagaggctgaagctgaaggacggcggccactacgacgctgaggtcaagaccacctacaaggccaagaagcccgtgcagctgcccggcgcctacaacgtcaacatcaagttggacatcacctcccacaacgaggactacaccatcgtggaacagtacgaacgcgccgagggccgccactccaccggcggcatggacgagctgtacaagtaagcggccgcgattaaaaaacctcccacacctccccctgaacctgaaacataaaatgaatgcaattgttgttgttaacttgtttattgcagcttataatggttacaaataaagcaatagcatcacaaatttcacaaataaagcatttttttcactgcattctagttgtggtttgtccaaactcatcaatgtatcttaaggaattcgataaaagttttgttactttatagaagaaattttgagtttttgtttttttttaataaataaataaacataaataaattgtttgttgaatttattattagtatgtaagtgtaaatataataaaacttaatatctattcaaattaataaataaacctcgatatacagaccgataaaacacatgcgtcaattttacgcatgattatctttaacgtacgtcacaatatgattatctttctagggttaatctagctgcggcgcgccggtacccaattcgccctatagtgagtcgtattacgcgcgctcactggccgtcgttttacaacgtcgtgactgggaaaaccctggcgttacccaacttaatcgccttgcagcacatccccctttcgccagctggcgtaatagcgaagaggcccgcaccgatcgcccttcccaacagttgcgcagcctgaatggcgaatgggacgcgccctgtagcggcgcattaagcgcggcgggtgtggtggttacgcgcagcgtgaccgctacacttgccagcgccctagcgcccgctcctttcgctttcttcccttcctttctcgccacgttcgccggctttccccgtcaagctctaaatcgggggctccctttagggttccgatttagtgctttacggcacctcgaccccaaaaaacttgattagggtgatggttcacgtagtgggccatcgccctgatagacggtttttcgccctttgacgttggagtccacgttctttaatagtggactcttgttccaaactggaacaacactcaaccctatctcggtctattcttttgatttataagggattttgccgatttcggcctattggttaaaaaatgagctgatttaacaaaaatttaacgcgaattttaacaaaatattaacgcttacaatttaggtggcacttttcggggaaatgtgcgcggaacccctatttgtttatttttctaaatacattcaaatatgtatccgctcatgagacaataaccctgataaatgcttcaataatattgaaaaaggaagagtatgagtattcaacatttccgtgtcgcccttattcccttttttgcggcattttgccttcctgtttttgctcacccagaaacgctggtgaaagtaaaagatgctgaagatcagttgggtgcacgagtgggttacatcgaactggatctcaacagcggtaagatccttgagagttttcgccccgaagaacgttttccaatgatgagcacttttaaagttctgctatgtggcgcggtattatcccgtattgacgccgggcaagagcaactcggtcgccgcatacactattctcagaatgacttggttgagtactcaccagtcacagaaaagcatcttacggatggcatgacagtaagagaattatgcagtgctgccataaccatgagtgataacactgcggccaacttacttctgacaacgatcggaggaccgaaggagctaaccgcttttttgcacaacatgggggatcatgtaactcgccttgatcgttgggaaccggagctgaatgaagccataccaaacgacgagcgtgacaccacgatgcctgtagcaatggcaacaacgttgcgcaaactattaactggcgaactacttactctagcttcccggcaacaattaatagactggatggaggcggataaagttgcaggaccacttctgcgctcggcccttccggctggctggtttattgctgataaatctggagccggtgagcgtgggtctcgcggtatcattgcagcactggggccagatggtaagccctcccgtatcgtagttatctacacgacggggagtcaggcaactatggatgaacgaaatagacagatcgctgagataggtgcctcactgattaagcattggtaactgtcagaccaagtttactcatatatactttagattgatttaaaacttcatttttaatttaaaaggatctaggtgaagatcctttttgataatctcatgaccaaaatcccttaacgtgagttttcgttccactgagcgtcagaccccgtagaaaagatcaaaggatcttcttgagatcctttttttctgcgcgtaatctgctgcttgcaaacaaaaaaaccaccgctaccagcggtggtttgtttgccggatcaagagctaccaactctttttccgaaggtaactggcttcagcagagcgcagataccaaatactgtccttctagtgtagccgtagttaggccaccacttcaagaactctgtagcaccgcctacatacctcgctctgctaatcctgttaccagtggctgctgccagtggcgataagtcgtgtcttaccgggttggactcaagacgatagttaccggataaggcgcagcggtcgggctgaacggggggttcgtgcacacagcccagcttggagcgaacgacctacaccgaactgagatacctacagcgtgagctatgagaaagcgccacgcttcccgaagggagaaaggcggacaggtatccggtaagcggcagggtcggaacaggagagcgcacgagggagcttccagggggaaacgcctggtatctttatagtcctgtcgggtttcgccacctctgacttgagcgtcgatttttgtgatgctcgtcaggggggcggagcctatggaaaaacgccagcaacgcggcctttttacggttcctggccttttgctggccttttgctcacatgttctttcctgcgttatcccctgattctgtggataaccgtattaccgcctttgagtgagctgataccgctcgccgcagccgaacgaccgagcgcagcgagtcagtgagcgaggaagcggaagagcgcccaatacgcaaaccgcctctccccgcgcgttggccgattcattaatgcagctggcacgacaggtttcccgactggaaagcgggcagtgagcgcaacgcaattaatgtgagttagctcactcattaggcaccccaggctttacactttatgcttccggctcgtatgttgtgtggaattgtgagcggataacaatttcacacaggaaacagctatgaccatgattacgccaagcgcgcaattaaccctcactaaagggaacaaaagctggagctccaccgcggggcgcgccgcagctagattaaccctagaaagatagtctgcgtaaaattgacgcatgcattcttgaaatattgctctctctttctaaatagcgcgaatccgtcgctgtgcatttaggacatctcagtcgccgcttggagctcccgtgaggcgtgcttgtcaatgcggtaagtgtcactgattttgaactataacaaccgcgtgagtcaaaatgacgcatgattatcttttacgtgacttttaagatttaactcatacgataattatattgttatttcgtgttctacttacgtgataacttattatatatatattttcttgttatagatgggaattcagacatgataagatacattgatgagtttggacaaaccacaactagaatgcagtgaaaaaaatgctttatttgtgaaatttgtgatgctattgctttatttgtaaccattataagctgcaataaacaagtttcgaggtcgagtgtcagtcctgctcctcggccacgaagtgcttagctcaggcaccgggcttgcgggtcatgcaccaggtgcgcggtccttcgggcacctcgacgtcggcggtgacggtgaagccgagccgctcgtagaaggggaggttgcggggcgcggaggtctccaggaaggcgggcaccccggcgcgctcggccgcctccactccggggagcacgacggcgctgcccagacccttgccctggtggtcgggcgagacgccgacggtggccaggaaccacgcgggctccttgggccggtgcggcgccaggaggccttccatctgttgctgcgcggccagccgggaaccgctcaactcggccatgcgcgggccgatctcggcgaacaccgcccccgcttcgacgctctccggcgtggtccagaccgccaccgcggcgccgtcgtccgcgacccacaccttgccgatgtcgagcccgacgcgcgtgaggaagagttcttgcagctcggtgacccgctcgatgtggcggtccgggtcgacggtgtggcgcgtggcggggtagtcggcgaacgcggcggcgagggtgcgtacggcccgggggacgtcgtcgcgggtggcgaggcgcaccgtgggcttgtactcggccatggtagggccgggattctcctccacgtcaccgcatgttagaagacttcctctgccctccccggggagcatgtcaaggtcaaaatcgtcaagagcgtcagcaggcagcatatcaaggtcaaagtcgtcaagggcatcggctgggagcatgtctaagtcaaaatcgtcaagggcgtcggccggcccgccgctttcgcactttagctgtttctccaggccacatatgattagttccaggccgaaaaggaaggcaggttcggctccctgccggtcgaacagctcaattgcttgtctcagaagtgggggcatagaatcggtggtaggtgtctctctttcctcttttgctacttgatgctcctgttcctccaatacgcagcccagtgtaaagtggcccacggcggacagagc

SEQ ID NO: 109 - DNA, 8938 bp, synthetic construct
  source 1..8938: mol_type = other DNA
attctgacaccgtgagtaagcacaggtcgggtcttcaatcatcgtctacggattgggacaccgaggtttctgaactcaacatgatcgtgctcctgtcgttgaggacccggctaggctggcggggttgccttactggttagcagaatgaatcaccgatacgcgagcgaacgtgaagcgactgctgctgcaaaacgtctgcgacctgagcaacaacatgaatggtcttcggtttccgtgtttcgtaaagtctggaaacgcggaagtcagcgccctgcaccattatgttccggatctgcatcgcaggatgctgctggctaccctgtggaacacctacatctgtattaacgaagcgctggcattgaccctgagtgatttttctctggtcccgccgcatccataccgccagttgtttaccctcacaacgttccagtaaccgggcatgttcatcatcagtaacccgtatcgtgagcatcctctctcgtttcatcggtatcattacccccatgaacagaaatcccccttacacggaggcatcagtgaccaaacaggaaaaaaccgcccttaacatggcccgctttatcagaagccagacattaacgcttctggagaaactcaacgagctggacgcggatgaacaggcagacatctgtgaatcgcttcacgaccacgctgatgagctttaccgcagctgcctcgcgcgtttcggtgatgacggtgaaaacctctgacacatgcagctcccggagacggtcacagcttgtctgtaagcggatgccgggagcagacaagcccgtcagggcgcgtcagcgggtgttggcgggtgtcggggcgcagccatgacccagtcacgtagcgatagcggagtgtatactggcttaactatgcggcatcagagcagattgtactgagagtgcaccatatgcggtgtgaaataccgcacagatgcgtaaggagaaaataccgcatcaggcgctcttccgcttcctcgctcactgactcgctgcgctcggtcgttcggctgcggcgagcggtatcagctcactcaaaggcggtaatacggttatccacagaatcaggggataacgcaggaaagaacatgtgagcaaaaggccagcaaaaggccaggaaccgtaaaaaggccgcgttgctggcgtttttccataggctccgcccccctgacgagcatcacaaaaatcgacgctcaagtcagaggtggcgaaacccgacaggactataaagataccaggcgtttccccctggaagctccctcgtgcgctctcctgttccgaccctgccgcttaccggatacctgtccgcctttctcccttcgggaagcgtggcgctttctcatagctcacgctgtaggtatctcagttcggtgtaggtcgttcgctccaagctgggctgtgtgcacgaaccccccgttcagcccgaccgctgcgccttatccggtaactatcgtcttgagtccaacccggtaagacacgacttatcgccactggcagcagccactggtaacaggattagcagagcgaggtatgtaggcggtgctacagagttcttgaagtggtggcctaactacggctacactagaaggacagtatttggtatctgcgctctgctgaagccagttaccttcggaaaaagagttggtagctcttgatccggcaaacaaaccaccgctggtagcggtggtttttttgtttgcaagcagcagattacgcgcagaaaaaaaggatctcaagaagatcctttgatcttttctacggggtctgacgctcagtggaacgaaaactcacgttaagggattttggtcatgagattatcaaaaaggatcttcacctagatccttttaaattaaaaatgaagttttaaatcaagcgatcgcgtcagttaacggcagccggagtgcgcagccgccggcagcctcgctctgcccactgggtggggcgggaggtaggtggggtgaggcgagctggacgtgcgggcgcggtcggcctctggcggggcgggggaggggagggagggtcagcgaaagtagctcgcgcgcgagcggccgcccaccctccccttcctctgggggagtcgttttacccgccgccggccgggcctcgtcgtctgattggctctcggggcccagaaaactggcccttgccattggctcgtgttcgtgcaagttgagtccatccgccggccagcgggggcggcgaggaggcgctcccaggttccggccctcccctcggctccgcgccgcagagtctggccgcgcgcccctgcgcaacgtggcaggaagcgcgcgctgggggcggggacgggcagtagggctgagcggctgcggggcgggtgcaagcacgtttccgacttgagttgcctcaagaggggcgtgctgagccagacctccatcgcgcactccggggagtggagggaaggagcgagggctcagttgggctgttttggaggcaggaagcacttgctctcccaaagtcgctctgagttgttatcagtaagggagctgcagtggagtaggcggggagaaggccgcacccttctccggaggggggaggggagtgttgcaatacctttctgggagttctctgctgcctcctggcttctgaggaccgccctgggcctgggagaatcccttccccctcttccctcgtgatctgcaactccagtctttctagagatagccctcgttcacagagaaagttcggttacactgcggatttcgacattgattattgactagttattaatagtaatcaattacggggtcattagttcatagcccatatatggagttccgcgttacataacttacggtaaatggcccgcctggctgaccgcccaacgacccccgcccattgacgtcaataatgacgtatgttcccatagtaacgccaatagggactttccattgacgtcaatgggtggactatttacggtaaactgcccacttggcagtacatcaagtgtatcatatgccaagtacgccccctattgacgtcaatgacggtaaatggcccgcctggcattatgcccagtacatgaccttatgggactttcctacttggcagtacatctacgtattagtcatcgctattaccatgggtcgaggtgagccccacgttctgcttcactctccccatctcccccccctccccacccccaattttgtatttatttattttttaattattttgtgcagcgatgggggcggggggggggggggcgcgcgccaggcggggcggggcggggcgaggggcggggcggggcgaggcggagaggtgcggcggcagccaatcagagcggcgcgctccgaaagtttccttttatggcgaggcggcggcggcggcggccctataaaaagcgaagcgcgcggcgggcgggagtcgctgcgttgccttcgccccgtgccccgctccgcgccgcctcgcgccgcccgccccggctctgactgaccgcgttactcccacaggtgagcgggcgggacggcccttctcctccgggctgtaattagcgcttggtttaatgacggctcgtttcttttctgtggctgcgtgaaagccttaaagggctccgggagggccctttgtgcgggggggagcggctcggggggtgcgtgcgtgtgtgtgtgcgtggggagcgccgcgtgcggcccgcgctgcccggcggctgtgagcgctgcgggcgcggcgcggggctttgtgcgctccgcgtgtgcgcgaggggagcgcggccgggggcggtgccccgcggtgcgggggggctgcgaggggaacaaaggctgcgtgcggggtgtgtgcgtgggggggtgagcagggggtgtgggcgcggcggtcgggctgtaacccccccctgcacccccctccccgagttgctgagcacggcccggcttcgggtgcggggctccgtgcggggcgtggcgcggggctcgccgtgccgggcggggggtggcggcaggtgggggtgccgggcggggcggggccgcctcgggccggggagggctcgggggaggggcgcggcggccccggagcgccggcggctgtcgaggcgcggcgagccgcagccattgccttttatggtaatcgtgcgagagggcgcagggacttcctttgtcccaaatctggcggagccgaaatctgggaggcgccgccgcaccccctctagcgggcgcgggcgaagcggtgcggcgccggcaggaaggaaatgggcggggagggccttcgtgcgtcgccgcgccgccgtccccttctccatctccagcctcggggctgccgcagggggacggctgccttcgggggggacggggcagggcggggttcggcttctggcgtgtgaccggcggctctagagcctctgctaaccatgttcatgccttcttctttttcctacagctcctgggcaacgtgctggttattgtgctgtctcatcattttggcaaaggcacctgtgattgcctcgggagttgaaatacacccagattgccaccatggcctcaccgttgacccgctttctgtcgctgaacctgctgctgctgggtgagtcgattatcctggggagtggagaagctactagtatggatcaagtccaactggtggagtctggtggcgctttggtgcagccaggtggctctctgcgtttgtcctgtgccgcttctggcttcccagtgaaccgctattccatgcgctggtatcgccaggctccaggcaaagagcgtgagtgggtagccggtatgtccagcgcgggtgatcgtagctcctatgaagactccgtgaagggccgtttcaccatcagccgtgacgatgcccgtaacacggtgtatctgcaaatgaacagcttgaaacctgaagatacggccgtgtattactgtaatgtgaacgtgggcttcgagtattggggccaaggcacccaggtcaccgtctccagcactagtaagccacaggcacccgaactccgaatctttccaaagaaaatggacgccgaacttggtcagaaggtggacctggtatgtgaagtgttggggtccgtttcgcaaggatgctcttggctcttccagaactccagctccaaactcccccagcccaccttcgttgtctatatggcttcatcccacaacaagataacgtgggacgagaagctgaattcgtcgaaactgttttctgccatgagggacacgaataataagtacgttctcaccctgaacaagttcagcaaggaaaacgaaggctactatttctgctcagtcatcagcaactcggtgatgtacttcagttctgtcgtgccagtccttcagaaagtgaactctactactaccaagccagtgctgcgaactccctcacctgtgcaccctaccgggacatctcagccccagagaccagaagattgtcggccccgtggctcagtgaaggggaccggattggacttcgcctgtgatatttacatctgggcacccttggccggaatctgcgtggcccttctgctgtccttgatcatcactctcatctgctaccacagccgcggatccaccatggtgagcaagggcgaggaggataacatggccatcatcaaggagttcatgcgcttcaaggtgcacatggagggctccgtgaacggccacgagttcgagatcgagggcgagggcgagggccgcccctacgagggcacccagaccgccaagctgaaggtgaccaagggtggccccctgcccttcgcctgggacatcctgtcccctcagttcatgtacggctccaaggcctacgtgaagcaccccgccgacatccccgactacttgaagctgtccttccccgagggcttcaagtgggagcgcgtgatgaacttcgaggacggcggcgtggtgaccgtgacccaggactcctccctgcaggacggcgagttcatctacaaggtgaagctgcgcggcaccaacttcccctccgacggccccgtaatgcagaagaagaccatgggctgggaggcctcctccgagcggatgtaccccgaggacggcgccctgaagggcgagatcaagcagaggctgaagctgaaggacggcggccactacgacgctgaggtcaagaccacctacaaggccaagaagcccgtgcagctgcccggcgcctacaacgtcaacatcaagttggacatcacctcccacaacgaggactacaccatcgtggaacagtacgaacgcgccgagggccgccactccaccggcggcatggacgagctgtacaagtaattaccaatagtcggcggttatcagcggaccctacgaagttggagtaacgaccttgaagacgagtacagagttccggtttgaatcaacctctggattacaaaatttgtgaaagattgactggtattcttaactatgttgctccttttacgctatgtggatacgctgctttaatgcctttgtatcatgctattgcttcccgtatggctttcattttctcctccttgtataaatcctggttgctgtctctttatgaggagttgtggcccgttgtcaggcaacgtggcgtggtgtgcactgtgtttgctgacgcaacccccactggttggggcattgccaccacctgtcagctcctttccgggactttcgctttccccctccctattgccacggcggaactcatcgccgcctgccttgcccgctgctggacaggggctcggctgttgggcactgacaattccgtggtgttgtcctcgagtctagagggcccgtttaaacccgctgatcagcctcgactgtgccttctagttgccagccatctgttgtttgcccctcccccgtgccttccttgaccctggaaggtgccactcccactgtcctttcctaataaaatgaggaaattgcatcgcattgtctgagtaggtgtcattctattctggggggtggggtggggcaggacagcaagggggaggattgggaagacaatagcaggcatgctggggatgcggtgggctctatggctatgagttcgttccctccttgcctcctggtggtagatagttctccaaccgaagtgtttacggaagatagagcccgctgtgggcgggagtcttctgggcaggcttaaaggctaacctggtgtgtgggcgttgtcctgcaggggaattgaacaggtgtaaaattggagggacaagacttcccacagattttcggttttgtcgggaagttttttaataggggcaaataaggaaaatgggaggataggtagtcatctggggttttatgcagcaaaactacaggttattattgcttgtgatccgcctcggagtattttccatcgaggtagattaaagacatgctcacccgagttttatactctcctgcttgagatccttactacagtatgaaattacagtgtcgcgagttagactatgtaagcagaattttaatcatttttaaagagcccagtacttcatatccatttctcccgctccttctgcagccttatcaaaaggtattttagaacactcattttagccccattttcatttattatactggcttatccaacccctagacagagcattggcattttccctttcctgatcttagaagtctgatgactcatgaaaccagacagattagttacatacaccacaaatcgaggctgtagctggggcctcaacactgcagttcttttataactccttagtacactttttgttgatcctttgccttgatccttaattttcagtgtctatcacctctcccgtcaggtggtgttccacatttgggcctattctcagtccagggagttttacaacaatagatgtattgagaatccaacctaaagcttaactttccactcccatgaatgcctctctcctttttctccatttagcgatcgcagacgtcaggtggcacttttcggggaaatgtgcgcggaacccctatttgtttatttttctaaatacattcaaatatgtatccgctcatgagacaataaccctgataaatgcttcaataatattgaaaaaggaagagtatgagtattcaacatttccgtgtcgcccttattcccttttttgcggcattttgccttcctgtttttgctcacccagaaacgctggtgaaagtaaaagatgctgaagatcagttgggtgcacgagtgggttacatcgaactggatctcaacagcggtaagatccttgagagttttcgccccgaagaacgttttccaatgatgagcacttttaaagttctgctatgtggcgcggtattatcccgtgttgacgccgggcaagagcaactcggtcgccgcatacactattctcagaatgacttggttgagtactcaccagtcacagaaaagcatcttacggatggcatgacagtaagagaattatgcagtgctgccataaccatgagtgataacactgcggccaacttacttctgacaacgatcggaggaccgaaggagctaaccgcttttttgcacaacatgggggatcatgtaactcgccttgatcgttgggaaccggagctgaatgaagccataccaaacgacgagcgtgacaccacgatgcctgcagcaatggcaacaacgttgcgcaaactattaactggcgaactacttactctagcttcccggcaacaattaatagactggatggaggcggataaagttgcaggaccacttctgcgctcggcccttccggctggctggtttattgctgataaatctggagccggtgagcgtgggtctcgcggtatcattgcagcactggggccagatggtaagccctcccgtatcgtagttatctacacgacggggagtcaggcaactatggatgaacgaaatagacagatcgctgagataggtgcctcactgattaagcattggtaactgtcagaccaagtttactcatatatactttagacgcagtccctgtcctgagtagtaaacttccgaatagagtg

SEQ ID NO: 110 - DNA, 9185 bp, synthetic construct
  source 1..9185: mol_type = other DNA
attctgacaccgtgagtaagcacaggtcgggtcttcaatcatcgtctacggattgggacaccgaggtttctgaactcaacatgatcgtgctcctgtcgttgaggacccggctaggctggcggggttgccttactggttagcagaatgaatcaccgatacgcgagcgaacgtgaagcgactgctgctgcaaaacgtctgcgacctgagcaacaacatgaatggtcttcggtttccgtgtttcgtaaagtctggaaacgcggaagtcagcgccctgcaccattatgttccggatctgcatcgcaggatgctgctggctaccctgtggaacacctacatctgtattaacgaagcgctggcattgaccctgagtgatttttctctggtcccgccgcatccataccgccagttgtttaccctcacaacgttccagtaaccgggcatgttcatcatcagtaacccgtatcgtgagcatcctctctcgtttcatcggtatcattacccccatgaacagaaatcccccttacacggaggcatcagtgaccaaacaggaaaaaaccgcccttaacatggcccgctttatcagaagccagacattaacgcttctggagaaactcaacgagctggacgcggatgaacaggcagacatctgtgaatcgcttcacgaccacgctgatgagctttaccgcagctgcctcgcgcgtttcggtgatgacggtgaaaacctctgacacatgcagctcccggagacggtcacagcttgtctgtaagcggatgccgggagcagacaagcccgtcagggcgcgtcagcgggtgttggcgggtgtcggggcgcagccatgacccagtcacgtagcgatagcggagtgtatactggcttaactatgcggcatcagagcagattgtactgagagtgcaccatatgcggtgtgaaataccgcacagatgcgtaaggagaaaataccgcatcaggcgctcttccgcttcctcgctcactgactcgctgcgctcggtcgttcggctgcggcgagcggtatcagctcactcaaaggcggtaatacggttatccacagaatcaggggataacgcaggaaagaacatgtgagcaaaaggccagcaaaaggccaggaaccgtaaaaaggccgcgttgctggcgtttttccataggctccgcccccctgacgagcatcacaaaaatcgacgctcaagtcagaggtggcgaaacccgacaggactataaagataccaggcgtttccccctggaagctccctcgtgcgctctcctgttccgaccctgccgcttaccggatacctgtccgcctttctcccttcgggaagcgtggcgctttctcatagctcacgctgtaggtatctcagttcggtgtaggtcgttcgctccaagctgggctgtgtgcacgaaccccccgttcagcccgaccgctgcgccttatccggtaactatcgtcttgagtccaacccggtaagacacgacttatcgccactggcagcagccactggtaacaggattagcagagcgaggtatgtaggcggtgctacagagttcttgaagtggtggcctaactacggctacactagaaggacagtatttggtatctgcgctctgctgaagccagttaccttcggaaaaagagttggtagctcttgatccggcaaacaaaccaccgctggtagcggtggtttttttgtttgcaagcagcagattacgcgcagaaaaaaaggatctcaagaagatcctttgatcttttctacggggtctgacgctcagtggaacgaaaactcacgttaagggattttggtcatgagattatcaaaaaggatcttcacctagatccttttaaattaaaaatgaagttttaaatcaagcgatcgcgtcagttaacggcagccggagtgcgcagccgccggcagcctcgctctgcccactgggtggggcgggaggtaggtggggtgaggcgagctggacgtgcgggcgcggtcggcctctggcggggcgggggaggggagggagggtcagcgaaagtagctcgcgcgcgagcggccgcccaccctccccttcctctgggggagtcgttttacccgccgccggccgggcctcgtcgtctgattggctctcggggcccagaaaactggcccttgccattggctcgtgttcgtgcaagttgagtccatccgccggccagcgggggcggcgaggaggcgctcccaggttccggccctcccctcggctccgcgccgcagagtctggccgcgcgcccctgcgcaacgtggcaggaagcgcgcgctgggggcggggacgggcagtagggctgagcggctgcggggcgggtgcaagcacgtttccgacttgagttgcctcaagaggggcgtgctgagccagacctccatcgcgcactccggggagtggagggaaggagcgagggctcagttgggctgttttggaggcaggaagcacttgctctcccaaagtcgctctgagttgttatcagtaagggagctgcagtggagtaggcggggagaaggccgcacccttctccggaggggggaggggagtgttgcaatacctttctgggagttctctgctgcctcctggcttctgaggaccgccctgggcctgggagaatcccttccccctcttccctcgtgatctgcaactccagtctttctagagatgttgcgactgtagagcgttgaccctgacacaatacttacgataacttcgtataatgtatgctatacgaagttatagtaattcatacaaaaggactcgcccctgccttggggaatcccagggaccgtcgttaaactcccactaacgtagaacccagaattcgatatcgccggctctgcggcctcttccgcgtcttcgccttcgccctcagacgagtcggatctccctttgggccgcctccccgcctgataacttcgtataatgtatgctatacgaagttatcgttacataacttacggtaaatggcccgcctggctgaccgcccaacgacccccgcccattgacgtcaataatgacgtatgttcccatagtaacgccaatagggactttccattgacgtcaatgggtggactatttacggtaaactgcccacttggcagtacatcaagtgtatcatatgccaagtacgccccctattgacgtcaatgacggtaaatggcccgcctggcattatgcccagtacatgaccttatgggactttcctacttggcagtacatctacgtattagtcatcgctattaccatgggtcgaggtgagccccacgttctgcttcactctccccatctcccccccctccccacccccaattttgtatttatttattttttaattattttgtgcagcgatgggggcggggggggggggggcgcgcgccaggcggggcggggcggggcgaggggcggggcggggcgaggcggagaggtgcggcggcagccaatcagagcggcgcgctccgaaagtttccttttatggcgaggcggcggcggcggcggccctataaaaagcgaagcgcgcggcgggcgggagtcgctgcgttgccttcgccccgtgccccgctccgcgccgcctcgcgccgcccgccccggctctgactgaccgcgttactcccacaggtgagcgggcgggacggcccttctcctccgggctgtaattagcgcttggtttaatgacggctcgtttcttttctgtggctgcgtgaaagccttaaagggctccgggagggccctttgtgcgggggggagcggctcggggggtgcgtgcgtgtgtgtgtgcgtggggagcgccgcgtgcggcccgcgctgcccggcggctgtgagcgctgcgggcgcggcgcggggctttgtgcgctccgcgtgtgcgcgaggggagcgcggccgggggcggtgccccgcggtgcgggggggctgcgaggggaacaaaggctgcgtgcggggtgtgtgcgtgggggggtgagcagggggtgtgggcgcggcggtcgggctgtaacccccccctgcacccccctccccgagttgctgagcacggcccggcttcgggtgcggggctccgtgcggggcgtggcgcggggctcgccgtgccgggcggggggtggcggcaggtgggggtgccgggcggggcggggccgcctcgggccggggagggctcgggggaggggcgcggcggccccggagcgccggcggctgtcgaggcgcggcgagccgcagccattgccttttatggtaatcgtgcgagagggcgcagggacttcctttgtcccaaatctggcggagccgaaatctgggaggcgccgccgcaccccctctagcgggcgcgggcgaagcggtgcggcgccggcaggaaggaaatgggcggggagggccttcgtgcgtcgccgcgccgccgtccccttctccatctccagcctcggggctgccgcagggggacggctgccttcgggggggacggggcagggcggggttcggcttctggcgtgtgaccggcggctctagagcctctgctaaccatgttcatgccttcttctttttcctacagctcctgggcaacgtgctggttattgtgctgtctcatcattttggcaaaggcacctgtgattgcctcgggagttgaaatacacccagattgccaccatggcctcaccgttgacccgctttctgtcgctgaacctgctgctgctgggtgagtcgattatcctggggagtggagaagctactagtatggatcaagtccaactggtggagtctggtggcgctttggtgcagccaggtggctctctgcgtttgtcctgtgccgcttctggcttcccagtgaaccgctattccatgcgctggtatcgccaggctccaggcaaagagcgtgagtgggtagccggtatgtccagcgcgggtgatcgtagctcctatgaagactccgtgaagggccgtttcaccatcagccgtgacgatgcccgtaacacggtgtatctgcaaatgaacagcttgaaacctgaagatacggccgtgtattactgtaatgtgaacgtgggcttcgagtattggggccaaggcacccaggtcaccgtctccagcactagtaagccacaggcacccgaactccgaatctttccaaagaaaatggacgccgaacttggtcagaaggtggacctggtatgtgaagtgttggggtccgtttcgcaaggatgctcttggctcttccagaactccagctccaaactcccccagcccaccttcgttgtctatatggcttcatcccacaacaagataacgtgggacgagaagctgaattcgtcgaaactgttttctgccatgagggacacgaataataagtacgttctcaccctgaacaagttcagcaaggaaaacgaaggctactatttctgctcagtcatcagcaactcggtgatgtacttcagttctgtcgtgccagtccttcagaaagtgaactctactactaccaagccagtgctgcgaactccctcacctgtgcaccctaccgggacatctcagccccagagaccagaagattgtcggccccgtggctcagtgaaggggaccggattggacttcgcctgtgatatttacatctgggcacccttggccggaatctgcgtggcccttctgctgtccttgatcatcactctcatctgctaccacagccgcggatccaccatggtgagcaagggcgaggaggataacatggccatcatcaaggagttcatgcgcttcaaggtgcacatggagggctccgtgaacggccacgagttcgagatcgagggcgagggcgagggccgcccctacgagggcacccagaccgccaagctgaaggtgaccaagggtggccccctgcccttcgcctgggacatcctgtcccctcagttcatgtacggctccaaggcctacgtgaagcaccccgccgacatccccgactacttgaagctgtccttccccgagggcttcaagtgggagcgcgtgatgaacttcgaggacggcggcgtggtgaccgtgacccaggactcctccctgcaggacggcgagttcatctacaaggtgaagctgcgcggcaccaacttcccctccgacggccccgtaatgcagaagaagaccatgggctgggaggcctcctccgagcggatgtaccccgaggacggcgccctgaagggcgagatcaagcagaggctgaagctgaaggacggcggccactacgacgctgaggtcaagaccacctacaaggccaagaagcccgtgcagctgcccggcgcctacaacgtcaacatcaagttggacatcacctcccacaacgaggactacaccatcgtggaacagtacgaacgcgccgagggccgccactccaccggcggcatggacgagctgtacaagtaattaccaatagtcggcggttatcagcggaccctacgaagttggagtaacgaccttgaagacgagtacagagttccggtttgaatcaacctctggattacaaaatttgtgaaagattgactggtattcttaactatgttgctccttttacgctatgtggatacgctgctttaatgcctttgtatcatgctattgcttcccgtatggctttcattttctcctccttgtataaatcctggttgctgtctctttatgaggagttgtggcccgttgtcaggcaacgtggcgtggtgtgcactgtgtttgctgacgcaacccccactggttggggcattgccaccacctgtcagctcctttccgggactttcgctttccccctccctattgccacggcggaactcatcgccgcctgccttgcccgctgctggacaggggctcggctgttgggcactgacaattccgtggtgttgtcctcgagtctagagggcccgtttaaacccgctgatcagcctcgactgtgccttctagttgccagccatctgttgtttgcccctcccccgtgccttccttgaccctggaaggtgccactcccactgtcctttcctaataaaatgaggaaattgcatcgcattgtctgagtaggtgtcattctattctggggggtggggtggggcaggacagcaagggggaggattgggaagacaatagcaggcatgctggggatgcggtgggctctatggctatgagttcgttccctccttgcctcctggtggtagatagccctacgggcgaccaaaggtcgcccgacgcccgggctttgcccgggcggcctcagtgagcgagcgagcgcgcagctgcctgcaggcctgaaaagtggataaccagcaccgttgtgagtgtctcctgggcgggagtcttctgggcaggcttaaaggctaacctggtgtgtgggcgttgtcctgcaggggaattgaacaggtgtaaaattggagggacaagacttcccacagattttcggttttgtcgggaagttttttaataggggcaaataaggaaaatgggaggataggtagtcatctggggttttatgcagcaaaactacaggttattattgcttgtgatccgcctcggagtattttccatcgaggtagattaaagacatgctcacccgagttttatactctcctgcttgagatccttactacagtatgaaattacagtgtcgcgagttagactatgtaagcagaattttaatcatttttaaagagcccagtacttcatatccatttctcccgctccttctgcagccttatcaaaaggtattttagaacactcattttagccccattttcatttattatactggcttatccaacccctagacagagcattggcattttccctttcctgatcttagaagtctgatgactcatgaaaccagacagattagttacatacaccacaaatcgaggctgtagctggggcctcaacactgcagttcttttataactccttagtacactttttgttgatcctttgccttgatccttaattttcagtgtctatcacctctcccgtcaggtggtgttccacatttgggcctattctcagtccagggagttttacaacaatagatgtattgagaatccaacctaaagcttaactttccactcccatgaatgcctctctcctttttctccatttagcgatcgcagacgtcaggtggcacttttcggggaaatgtgcgcggaacccctatttgtttatttttctaaatacattcaaatatgtatccgctcatgagacaataaccctgataaatgcttcaataatattgaaaaaggaagagtatgagtattcaacatttccgtgtcgcccttattcccttttttgcggcattttgccttcctgtttttgctcacccagaaacgctggtgaaagtaaaagatgctgaagatcagttgggtgcacgagtgggttacatcgaactggatctcaacagcggtaagatccttgagagttttcgccccgaagaacgttttccaatgatgagcacttttaaagttctgctatgtggcgcggtattatcccgtgttgacgccgggcaagagcaactcggtcgccgcatacactattctcagaatgacttggttgagtactcaccagtcacagaaaagcatcttacggatggcatgacagtaagagaattatgcagtgctgccataaccatgagtgataacactgcggccaacttacttctgacaacgatcggaggaccgaaggagctaaccgcttttttgcacaacatgggggatcatgtaactcgccttgatcgttgggaaccggagctgaatgaagccataccaaacgacgagcgtgacaccacgatgcctgcagcaatggcaacaacgttgcgcaaactattaactggcgaactacttactctagcttcccggcaacaattaatagactggatggaggcggataaagttgcaggaccacttctgcgctcggcccttccggctggctggtttattgctgataaatctggagccggtgagcgtgggtctcgcggtatcattgcagcactggggccagatggtaagccctcccgtatcgtagttatctacacgacggggagtcaggcaactatggatgaacgaaatagacagatcgctgagataggtgcctcactgattaagcattggtaactgtcagaccaagtttactcatatatactttagacgcagtccctgtcctgagtagtaaacttccgaatagagtg

SEQ ID NO: 111 - DNA, 7377 bp, synthetic construct
  source 1..7377: mol_type = other DNA
gttgtttaccctcacaacgttccagtaaccgggcatgttcatcatcagtaacccgtatcgtgagcatcctctctcgtttcatcggtatcattacccccatgaacagaaatcccccttacacggaggcatcagtgaccaaacaggaaaaaaccgcccttaacatggcccgctttatcagaagccagacattaacgcttctggagaaactcaacgagctggacgcggatgaacaggcagacatctgtgaatcgcttcacgaccacgctgatgagctttaccgcagctgcctcgcgcgtttcggtgatgacggtgaaaacctctgacacatgcagctcccggagacggtcacagcttgtctgtaagcggatgccgggagcagacaagcccgtcagggcgcgtcagcgggtgttggcgggtgtcggggcgcagccatgacccagtcacgtagcgatagcggagtgtatactggcttaactatgcggcatcagagcagattgtactgagagtgcaccatatgcggtgtgaaataccgcacagatgcgtaaggagaaaataccgcatcaggcgctcttccgcttcctcgctcactgactcgctgcgctcggtcgttcggctgcggcgagcggtatcagctcactcaaaggcggtaatacggttatccacagaatcaggggataacgcaggaaagaacatgtgagcaaaaggccagcaaaaggccaggaaccgtaaaaaggccgcgttgctggcgtttttccataggctccgcccccctgacgagcatcacaaaaatcgacgctcaagtcagaggtggcgaaacccgacaggactataaagataccaggcgtttccccctggaagctccctcgtgcgctctcctgttccgaccctgccgcttaccggatacctgtccgcctttctcccttcgggaagcgtggcgctttctcatagctcacgctgtaggtatctcagttcggtgtaggtcgttcgctccaagctgggctgtgtgcacgaaccccccgttcagcccgaccgctgcgccttatccggtaactatcgtcttgagtccaacccggtaagacacgacttatcgccactggcagcagccactggtaacaggattagcagagcgaggtatgtaggcggtgctacagagttcttgaagtggtggcctaactacggctacactagaaggacagtatttggtatctgcgctctgctgaagccagttaccttcggaaaaagagttggtagctcttgatccggcaaacaaaccaccgctggtagcggtggtttttttgtttgcaagcagcagattacgcgcagaaaaaaaggatctcaagaagatcctttgatcttttctacggggtctgacgctcagtggaacgaaaactcacgttaagggattttggtcatgagattatcaaaaaggatcttcacctagatccttttaaattaaaaatgaagttttaaatcaagttgcgactgtagagcgttgaccctgacacaatacttacgattaccctgttatccctacgctaccttcggtgaaagtgagtcggcacaatctcgtaatgtgaacactgcttcgccacttattgatagtcgcaacgggagcgatcgctaaaagcagcgattcgtggctcagtcccagagtcgtatctagctagtcaggtagtaaaaggtctcaactaggcagtggcagagcaggattcaaattcagggctgttgtgatgcctccgcagactctgagcgccacctggtggtaatttgtctgtgcctcttctgacgtggaagaacagcaactaacacactaacacggcatttactatgggccagccattgttctaaagccctcgttcacagagaaagttcggttacactgcggatttcgacattgattattgactagttattaatagtaatcaattacggggtcattagttcatagcccatatatggagttccgcgttacataacttacggtaaatggcccgcctggctgaccgcccaacgacccccgcccattgacgtcaataatgacgtatgttcccatagtaacgccaatagggactttccattgacgtcaatgggtggactatttacggtaaactgcccacttggcagtacatcaagtgtatcatatgccaagtacgccccctattgacgtcaatgacggtaaatggcccgcctggcattatgcccagtacatgaccttatgggactttcctacttggcagtacatctacgtattagtcatcgctattaccatgggtcgaggtgagccccacgttctgcttcactctccccatctcccccccctccccacccccaattttgtatttatttattttttaattattttgtgcagcgatgggggcggggggggggggggcgcgcgccaggcggggcggggcggggcgaggggcggggcggggcgaggcggagaggtgcggcggcagccaatcagagcggcgcgctccgaaagtttccttttatggcgaggcggcggcggcggcggccctataaaaagcgaagcgcgcggcgggcgggagtcgctgcgttgccttcgccccgtgccccgctccgcgccgcctcgcgccgcccgccccggctctgactgaccgcgttactcccacaggtgagcgggcgggacggcccttctcctccgggctgtaattagcgcttggtttaatgacggctcgtttcttttctgtggctgcgtgaaagccttaaagggctccgggagggccctttgtgcgggggggagcggctcggggggtgcgtgcgtgtgtgtgtgcgtggggagcgccgcgtgcggcccgcgctgcccggcggctgtgagcgctgcgggcgcggcgcggggctttgtgcgctccgcgtgtgcgcgaggggagcgcggccgggggcggtgccccgcggtgcgggggggctgcgaggggaacaaaggctgcgtgcggggtgtgtgcgtgggggggtgagcagggggtgtgggcgcggcggtcgggctgtaacccccccctgcacccccctccccgagttgctgagcacggcccggcttcgggtgcggggctccgtgcggggcgtggcgcggggctcgccgtgccgggcggggggtggcggcaggtgggggtgccgggcggggcggggccgcctcgggccggggagggctcgggggaggggcgcggcggccccggagcgccggcggctgtcgaggcgcggcgagccgcagccattgccttttatggtaatcgtgcgagagggcgcagggacttcctttgtcccaaatctggcggagccgaaatctgggaggcgccgccgcaccccctctagcgggcgcgggcgaagcggtgcggcgccggcaggaaggaaatgggcggggagggccttcgtgcgtcgccgcgccgccgtccccttctccatctccagcctcggggctgccgcagggggacggctgccttcgggggggacggggcagggcggggttcggcttctggcgtgtgaccggcggctctagagcctctgctaaccatgttcatgccttcttctttttcctacagctcctgggcaacgtgctggttattgtgctgtctcatcattttggcaaaggcacctgtgattgcctcgggagttgaaatacacccagattatggtagagatgctgccaactgtcgctgtgctggtcttggcagtgtccgtggttgccaaggataacaccacgctgcaggaattcgccaccatggtgagcaagggcgaggaggataacatggccatcatcaaggagttcatgcgcttcaaggtgcacatggagggctccgtgaacggccacgagttcgagatcgagggcgagggcgagggccgcccctacgagggcacccagaccgccaagctgaaggtgaccaagggtggccccctgcccttcgcctgggacatcctgtcccctcagttcatgtacggctccaaggcctacgtgaagcaccccgccgacatccccgactacttgaagctgtccttccccgagggcttcaagtgggagcgcgtgatgaacttcgaggacggcggcgtggtgaccgtgacccaggactcctccctgcaggacggcgagttcatctacaaggtgaagctgcgcggcaccaacttcccctccgacggccccgtaatgcagaagaagaccatgggctgggaggcctcctccgagcggatgtaccccgaggacggcgccctgaagggcgagatcaagcagaggctgaagctgaaggacggcggccactacgacgctgaggtcaagaccacctacaaggccaagaagcccgtgcagctgcccggcgcctacaacgtcaacatcaagttggacatcacctcccacaacgaggactacaccatcgtggaacagtacgaacgcgccgagggccgccactccaccggcggcatggacgagctgtacaagcaggttcaactggtggaaagcggcggtgctctggtacaaccgggcggtagtctgcgcctgagctgtgccgcaagcggtttcccagtcaaccgctactctatgcgttggtatcgccaggcgcctggtaaagaacgtgaatgggttgccggcatgagcagtgcgggcgatcgttctagttacgaggactctgttaaaggtcgttttacaattagccgtgatgatgcgcgcaataccgtgtatctgcaaatgaacagtctgaagccggaggacaccgcagtatattattgcaatgtcaacgtggggtttgaatattggggccaggggactcaggtgacggtgagctctcaactcgagaatggcggcataagcctgctggttcagaacacatcctggatgctgctgctgctgctttccctctccctcctccaagccctggacttcatttctctgtaattaccaatagtcggcggttatcagcggaccctacgaagttggagtaacgaccttgaagacgagtacagagttccggtttgaatcaacctctggattacaaaatttgtgaaagattgactggtattcttaactatgttgctccttttacgctatgtggatacgctgctttaatgcctttgtatcatgctattgcttcccgtatggctttcattttctcctccttgtataaatcctggttgctgtctctttatgaggagttgtggcccgttgtcaggcaacgtggcgtggtgtgcactgtgtttgctgacgcaacccccactggttggggcattgccaccacctgtcagctcctttccgggactttcgctttccccctccctattgccacggcggaactcatcgccgcctgccttgcccgctgctggacaggggctcggctgttgggcactgacaattccgtggtgttgtcctcgagtctagagggcccgtttaaacccgctgatcagcctcgactgtgccttctagttgccagccatctgttgtttgcccctcccccgtgccttccttgaccctggaaggtgccactcccactgtcctttcctaataaaatgaggaaattgcatcgcattgtctgagtaggtgtcattctattctggggggtggggtggggcaggacagcaagggggaggattgggaagacaatagcaggcatgctggggatgcggtgggctctatggctatgagttcgttccctccttgcctcctggtggtagatagttctccaaccgaagtgtttacggaagatagagcccgctgttagccctgagtctgcgttgtaagagcaataggtccactacgcgatcgcgcttttaccacgaacgataataggttggcgggtcactccaaaaagggtcgtgcggcgatactacaatctcctgttactcgtagggataacagggtaatcctgaaaagtggataaccagcaccgttgtgagtgtctcctagacgtcaggtggcacttttcggggaaatgtgcgcggaacccctatttgtttatttttctaaatacattcaaatatgtatccgctcatgagacaataaccctgataaatgcttcaataatattgaaaaaggaagagtatgagtattcaacatttccgtgtcgcccttattcccttttttgcggcattttgccttcctgtttttgctcacccagaaacgctggtgaaagtaaaagatgctgaagatcagttgggtgcacgagtgggttacatcgaactggatctcaacagcggtaagatccttgagagttttcgccccgaagaacgttttccaatgatgagcacttttaaagttctgctatgtggcgcggtattatcccgtgttgacgccgggcaagagcaactcggtcgccgcatacactattctcagaatgacttggttgagtactcaccagtcacagaaaagcatcttacggatggcatgacagtaagagaattatgcagtgctgccataaccatgagtgataacactgcggccaacttacttctgacaacgatcggaggaccgaaggagctaaccgcttttttgcacaacatgggggatcatgtaactcgccttgatcgttgggaaccggagctgaatgaagccataccaaacgacgagcgtgacaccacgatgcctgcagcaatggcaacaacgttgcgcaaactattaactggcgaactacttactctagcttcccggcaacaattaatagactggatggaggcggataaagttgcaggaccacttctgcgctcggcccttccggctggctggtttattgctgataaatctggagccggtgagcgtgggtctcgcggtatcattgcagcactggggccagatggtaagccctcccgtatcgtagttatctacacgacggggagtcaggcaactatggatgaacgaaatagacagatcgctgagataggtgcctcactgattaagcattggtaactgtcagaccaagtttactcatatatactttagacgcagtccctgtcctgagtagtaaacttccgaatagagtgattctgacaccgtgagtaagcacaggtcgggtcttcaatcatcgtctacggattgggacaccgaggtttctgaactcaacatgatcgtgctcctgtcgttgaggacccggctaggctggcggggttgccttactggttagcagaatgaatcaccgatacgcgagcgaacgtgaagcgactgctgctgcaaaacgtctgcgacctgagcaacaacatgaatggtcttcggtttccgtgtttcgtaaagtctggaaacgcggaagtcagcgccctgcaccattatgttccggatctgcatcgcaggatgctgctggctaccctgtggaacacctacatctgtattaacgaagcgctggcattgaccctgagtgatttttctctggtcccgccgcatccataccgcca

SEQ ID NO: 112 - DNA, 8279 bp, synthetic construct
  source 1..8279: mol_type = other DNA
attctgacaccgtgagtaagcacaggtcgggtcttcaatcatcgtctacggattgggacaccgaggtttctgaactcaacatgatcgtgctcctgtcgttgaggacccggctaggctggcggggttgccttactggttagcagaatgaatcaccgatacgcgagcgaacgtgaagcgactgctgctgcaaaacgtctgcgacctgagcaacaacatgaatggtcttcggtttccgtgtttcgtaaagtctggaaacgcggaagtcagcgccctgcaccattatgttccggatctgcatcgcaggatgctgctggctaccctgtggaacacctacatctgtattaacgaagcgctggcattgaccctgagtgatttttctctggtcccgccgcatccataccgccagttgtttaccctcacaacgttccagtaaccgggcatgttcatcatcagtaacccgtatcgtgagcatcctctctcgtttcatcggtatcattacccccatgaacagaaatcccccttacacggaggcatcagtgaccaaacaggaaaaaaccgcccttaacatggcccgctttatcagaagccagacattaacgcttctggagaaactcaacgagctggacgcggatgaacaggcagacatctgtgaatcgcttcacgaccacgctgatgagctttaccgcagctgcctcgcgcgtttcggtgatgacggtgaaaacctctgacacatgcagctcccggagacggtcacagcttgtctgtaagcggatgccgggagcagacaagcccgtcagggcgcgtcagcgggtgttggcgggtgtcggggcgcagccatgacccagtcacgtagcgatagcggagtgtatactggcttaactatgcggcatcagagcagattgtactgagagtgcaccatatgcggtgtgaaataccgcacagatgcgtaaggagaaaataccgcatcaggcgctcttccgcttcctcgctcactgactcgctgcgctcggtcgttcggctgcggcgagcggtatcagctcactcaaaggcggtaatacggttatccacagaatcaggggataacgcaggaaagaacatgtgagcaaaaggccagcaaaaggccaggaaccgtaaaaaggccgcgttgctggcgtttttccataggctccgcccccctgacgagcatcacaaaaatcgacgctcaagtcagaggtggcgaaacccgacaggactataaagataccaggcgtttccccctggaagctccctcgtgcgctctcctgttccgaccctgccgcttaccggatacctgtccgcctttctcccttcgggaagcgtggcgctttctcatagctcacgctgtaggtatctcagttcggtgtaggtcgttcgctccaagctgggctgtgtgcacgaaccccccgttcagcccgaccgctgcgccttatccggtaactatcgtcttgagtccaacccggtaagacacgacttatcgccactggcagcagccactggtaacaggattagcagagcgaggtatgtaggcggtgctacagagttcttgaagtggtggcctaactacggctacactagaaggacagtatttggtatctgcgctctgctgaagccagttaccttcggaaaaagagttggtagctcttgatccggcaaacaaaccaccgctggtagcggtggtttttttgtttgcaagcagcagattacgcgcagaaaaaaaggatctcaagaagatcctttgatcttttctacggggtctgacgctcagtggaacgaaaactcacgttaagggattttggtcatgagattatcaaaaaggatcttcacctagatccttttaaattaaaaatgaagttttaaatcaagcgatcgcgtcagttaacggcagccggagtgcgcagccgccggcagcctcgctctgcccactgggtggggcgggaggtaggtggggtgaggcgagctggacgtgcgggcgcggtcggcctctggcggggcgggggaggggagggagggtcagcgaaagtagctcgcgcgcgagcggccgcccaccctccccttcctctgggggagtcgttttacccgccgccggccgggcctcgtcgtctgattggctctcggggcccagaaaactggcccttgccattggctcgtgttcgtgcaagttgagtccatccgccggccagcgggggcggcgaggaggcgctcccaggttccggccctcccctcggctccgcgccgcagagtctggccgcgcgcccctgcgcaacgtggcaggaagcgcgcgctgggggcggggacgggcagtagggctgagcggctgcggggcgggtgcaagcacgtttccgacttgagttgcctcaagaggggcgtgctgagccagacctccatcgcgcactccggggagtggagggaaggagcgagggctcagttgggctgttttggaggcaggaagcacttgctctcccaaagtcgctctgagttgttatcagtaagggagctgcagtggagtaggcggggagaaggccgcacccttctccggaggggggaggggagtgttgcaatacctttctgggagttctctgctgcctcctggcttctgaggaccgccctgggcctgggagaatcccttccccctcttccctcgtgatctgcaactccagtctttctagagatgttgcgactgtagagcgttgaccctgacacaatacttacgataacttcgtataatgtatgctatacgaagttatagtaattcatacaaaaggactcgcccctgccttggggaatcccagggaccgtcgttaaactcccactaacgtagaacccagaattcgatatcgccggctctgcggcctcttccgcgtcttcgccttcgccctcagacgagtcggatctccctttgggccgcctccccgcctgataacttcgtataatgtatgctatacgaagttatgacattgattattgactagttattaatagtaatcaattacggggtcattagttcatagcccatatatggagttccgcgttacataacttacggtaaatggcccgcctggctgaccgcccaacgacccccgcccattgacgtcaataatgacgtatgttcccatagtaacgccaatagggactttccattgacgtcaatgggtggagtatttacggtaaactgcccacttggcagtacatcaagtgtatcatatgccaagtacgccccctattgacgtcaatgacggtaaatggcccgcctggcattatgcccagtacatgaccttatgggactttcctacttggcagtacatctacgtattagtcatcgctattaccatggtcgaggtgagccccacgttctgcttcactctccccatctcccccccctccccacccccaattttgtatttatttattttttaattattttgtgcagcgatgggggcgggggggggcgaggcggagaggtgcggcggcagccaatcagagcggcgcgctccgaaagtttccttttatggcgaggcggcggcggcggcggccctataaaaagcgaagcgcgcggcgggcgggagtcgctgcgcgctgccttcgccccgtgccccgctccgccgccgcctcgcgccgcccgccccggctctgactgaccgcgttactcccacaggtgagcgggcgggacggcccttctcctccgggctgtaattagcgcttggtttaatgacggcttgtttcttttctgtggctgcgtgaaagccttgaggggctccgggagggccctttgtgcggggggagcggctcggggggtgcgtgcgtgtgtgtgtgcgtggggagcgccgcgtgcggctccgcgctgcccggcggctgtgagcgctgcgggcgcggcgcggggctttgtgcgctccgcagtgtgcgcgaggggagcgcggccgggggcggtgccccgcggtgcggggggggctgcgaggggaacaaaggctgcgtgcggggtgtgtgcgtgggggggtgagcagggggtgtgggcgcgtcggtcgggctgcaaccccccctgcacccccctccccgagttgctgagcacggcccggcttcgggtgcggggctccgtacggggcgtggcgcggggctcgccgtgccgggcggggggtggcggcaggtgggggtgccgggcggggcggggccgcctcgggccggggagggctcgggggaggggcgcggcggcccccggagcgccggcggctgtcgaggcgcggcgagccgcagccattgccttttatggtaatcgtgcgagagggcgcagggacttcctttgtcccaaatctgtgcggagccgaaatctgggaggcgccgccgcaccccctctagcgggcgcggggcgaagcggtgcggcgccggcaggaaggaaatgggcggggagggccttcgtgcgtcgccgcgccgccgtccccttctccctctccagcctcggggctgtccgcggggggacggctgccttcgggggggacggggcagggcggggttcggcttctggcgtgtgaccggcggctctagagcctctgctaaccatgttcatgccttcttctttttcctacagctcctgggcaacgtgctggttattgtgctgtctcatcattttggcaaagaagtaccgagctcggatccactagtaacggccgccagtgtgctggaattcggcttttagggcaggagtatggtagagatgctgccaactgtcgctgtgctggtcttggcagtgtccgtggttgccaaggataacaccacgctgcaggaattcgccaccatggtgagcaagggcgaggaggataacatggccatcatcaaggagttcatgcgcttcaaggtgcacatggagggctccgtgaacggccacgagttcgagatcgagggcgagggcgagggccgcccctacgagggcacccagaccgccaagctgaaggtgaccaagggtggccccctgcccttcgcctgggacatcctgtcccctcagttcatgtacggctccaaggcctacgtgaagcaccccgccgacatccccgactacttgaagctgtccttccccgagggcttcaagtgggagcgcgtgatgaacttcgaggacggcggcgtggtgaccgtgacccaggactcctccctgcaggacggcgagttcatctacaaggtgaagctgcgcggcaccaacttcccctccgacggccccgtaatgcagaagaagaccatgggctgggaggcctcctccgagcggatgtaccccgaggacggcgccctgaagggcgagatcaagcagaggctgaagctgaaggacggcggccactacgacgctgaggtcaagaccacctacaaggccaagaagcccgtgcagctgcccggcgcctacaacgtcaacatcaagttggacatcacctcccacaacgaggactacaccatcgtggaacagtacgaacgcgccgagggccgccactccaccggcggcatggacgagctgtacaagcaggttcaactggtggaaagcggcggtgctctggtacaaccgggcggtagtctgcgcctgagctgtgccgcaagcggtttcccagtcaaccgctactctatgcgttggtatcgccaggcgcctggtaaagaacgtgaatgggttgccggcatgagcagtgcgggcgatcgttctagttacgaggactctgttaaaggtcgttttacaattagccgtgatgatgcgcgcaataccgtgtatctgcaaatgaacagtctgaagccggaggacaccgcagtatattattgcaatgtcaacgtggggtttgaatattggggccaggggactcaggtgacggtgagctctcaactcgagaatggcggcataagcctgctggttcagaacacatcctggatgctgctgctgctgctttccctctccctcctccaagccctggacttcatttctctgtaattaccaatagtcggcggttatcagcggaccctacgaagttctgtgccttctagttgccagccatctgttgtttgcccctcccccgtgccttccttgaccctggaaggtgccactcccactgtcctttcctaataaaatgaggaaattgcatcgcattgtctgagtaggtgtcattctattctggggggtggggtggggcaggacagcaagggggaggattgggaagagaatagcaggcatgctggggagcggccgcaggaacccctagtgatggagttggccactccctctctgcgcgctcgctcgctcactgaggccgggcgaccaaaggtcgcccgacgcccgggctttgcccgggcggcctcagtgagcgagcgagcgcgcagctgcctgcaggcctgaaaagtggataaccagcaccgttgtgagtgtctcctgggcgggagtcttctgggcaggcttaaaggctaacctggtgtgtgggcgttgtcctgcaggggaattgaacaggtgtaaaattggagggacaagacttcccacagattttcggttttgtcgggaagttttttaataggggcaaataaggaaaatgggaggataggtagtcatctggggttttatgcagcaaaactacaggttattattgcttgtgatccgcctcggagtattttccatcgaggtagattaaagacatgctcacccgagttttatactctcctgcttgagatccttactacagtatgaaattacagtgtcgcgagttagactatgtaagcagaattttaatcatttttaaagagcccagtacttcatatccatttctcccgctccttctgcagccttatcaaaaggtattttagaacactcattttagccccattttcatttattatactggcttatccaacccctagacagagcattggcattttccctttcctgatcttagaagtctgatgactcatgaaaccagacagattagttacatacaccacaaatcgaggctgtagctggggcctcaacactgcagttcttttataactccttagtacactttttgttgatcctttgccttgatccttaattttcagtgtctatcacctctcccgtcaggtggtgttccacatttgggcctattctcagtccagggagttttacaacaatagatgtattgagaatccaacctaaagcttaactttccactcccatgaatgcctctctcctttttctccatttagcgatcgcagacgtcaggtggcacttttcggggaaatgtgcgcggaacccctatttgtttatttttctaaatacattcaaatatgtatccgctcatgagacaataaccctgataaatgcttcaataatattgaaaaaggaagagtatgagtattcaacatttccgtgtcgcccttattcccttttttgcggcattttgccttcctgtttttgctcacccagaaacgctggtgaaagtaaaagatgctgaagatcagttgggtgcacgagtgggttacatcgaactggatctcaacagcggtaagatccttgagagttttcgccccgaagaacgttttccaatgatgagcacttttaaagttctgctatgtggcgcggtattatcccgtgttgacgccgggcaagagcaactcggtcgccgcatacactattctcagaatgacttggttgagtactcaccagtcacagaaaagcatcttacggatggcatgacagtaagagaattatgcagtgctgccataaccatgagtgataacactgcggccaacttacttctgacaacgatcggaggaccgaaggagctaaccgcttttttgcacaacatgggggatcatgtaactcgccttgatcgttgggaaccggagctgaatgaagccataccaaacgacgagcgtgacaccacgatgcctgcagcaatggcaacaacgttgcgcaaactattaactggcgaactacttactctagcttcccggcaacaattaatagactggatggaggcggataaagttgcaggaccacttctgcgctcggcccttccggctggctggtttattgctgataaatctggagccggtgagcgtgggtctcgcggtatcattgcagcactggggccagatggtaagccctcccgtatcgtagttatctacacgacggggagtcaggcaactatggatgaacgaaatagacagatcgctgagataggtgcctcactgattaagcattggtaactgtcagaccaagtttactcatatatactttagacgcagtccctgtcctgagtagtaaacttccgaatagagtg

SEQ ID NO: 113 - DNA, 8145 bp, synthetic construct
  source 1..8145: mol_type = other DNA
ctggcgaactacttactctagcttcccggcaacaattaatagactggatggaggcggataaagttgcaggaccacttctgcgctcggcccttccggctggctggtttattgctgataaatctggagccggtgagcgtgggtctcgcggtatcattgcagcactggggccagatggtaagccctcccgtatcgtagttatctacacgacggggagtcaggcaactatggatgaacgaaatagacagatcgctgagataggtgcctcactgattaagcattggtaactgtcagaccaagtttactcatatatactttagacgcagtccctgtcctgagtagtaaacttccgaatagagtgattctgacaccgtgagtaagcacaggtcgggtcttcaatcatcgtctacggattgggacaccgaggtttctgaactcaacatgatcgtgctcctgtcgttgaggacccggctaggctggcggggttgccttactggttagcagaatgaatcaccgatacgcgagcgaacgtgaagcgactgctgctgcaaaacgtctgcgacctgagcaacaacatgaatggtcttcggtttccgtgtttcgtaaagtctggaaacgcggaagtcagcgccctgcaccattatgttccggatctgcatcgcaggatgctgctggctaccctgtggaacacctacatctgtattaacgaagcgctggcattgaccctgagtgatttttctctggtcccgccgcatccataccgccagttgtttaccctcacaacgttccagtaaccgggcatgttcatcatcagtaacccgtatcgtgagcatcctctctcgtttcatcggtatcattacccccatgaacagaaatcccccttacacggaggcatcagtgaccaaacaggaaaaaaccgcccttaacatggcccgctttatcagaagccagacattaacgcttctggagaaactcaacgagctggacgcggatgaacaggcagacatctgtgaatcgcttcacgaccacgctgatgagctttaccgcagctgcctcgcgcgtttcggtgatgacggtgaaaacctctgacacatgcagctcccggagacggtcacagcttgtctgtaagcggatgccgggagcagacaagcccgtcagggcgcgtcagcgggtgttggcgggtgtcggggcgcagccatgacccagtcacgtagcgatagcggagtgtatactggcttaactatgcggcatcagagcagattgtactgagagtgcaccatatgcggtgtgaaataccgcacagatgcgtaaggagaaaataccgcatcaggcgctcttccgcttcctcgctcactgactcgctgcgctcggtcgttcggctgcggcgagcggtatcagctcactcaaaggcggtaatacggttatccacagaatcaggggataacgcaggaaagaacatgtgagcaaaaggccagcaaaaggccaggaaccgtaaaaaggccgcgttgctggcgtttttccataggctccgcccccctgacgagcatcacaaaaatcgacgctcaagtcagaggtggcgaaacccgacaggactataaagataccaggcgtttccccctggaagctccctcgtgcgctctcctgttccgaccctgccgcttaccggatacctgtccgcctttctcccttcgggaagcgtggcgctttctcatagctcacgctgtaggtatctcagttcggtgtaggtcgttcgctccaagctgggctgtgtgcacgaaccccccgttcagcccgaccgctgcgccttatccggtaactatcgtcttgagtccaacccggtaagacacgacttatcgccactggcagcagccactggtaacaggattagcagagcgaggtatgtaggcggtgctacagagttcttgaagtggtggcctaactacggctacactagaaggacagtatttggtatctgcgctctgctgaagccagttaccttcggaaaaagagttggtagctcttgatccggcaaacaaaccaccgctggtagcggtggtttttttgtttgcaagcagcagattacgcgcagaaaaaaaggatctcaagaagatcctttgatcttttctacggggtctgacgctcagtggaacgaaaactcacgttaagggattttggtcatgagattatcaaaaaggatcttcacctagatccttttaaattaaaaatgaagttttaaatcaagttgcgactgtagagcgttgaccctgacacaatacttacgattaccctgttatccctacgctaccttcggtgaaagtgagtcggcacaatctcgtaatgtgaacactgcttcgccacttattgatagtcgcaacgggagcgatcgctaaaagcagcgattcgtggctcagtcccagagtcgtatctagctagtcaggtagtaaaaggtctcaactaggcagtggcagagcaggattcaaattcagggctgttgtgatgcctccgcagactctgagcgccacctggtggtaatttgtctgtgcctcttctgacgtggaagaacagcaactaacacactaacacggcatttactatgggccagccattgttctaaagccctcgttcacagagaaagttcggttacactgcggatttcgacattgattattgactagttattaatagtaatcaattacggggtcattagttcatagcccatatatggagttccgcgttacataacttacggtaaatggcccgcctggctgaccgcccaacgacccccgcccattgacgtcaataatgacgtatgttcccatagtaacgccaatagggactttccattgacgtcaatgggtggactatttacggtaaactgcccacttggcagtacatcaagtgtatcatatgccaagtacgccccctattgacgtcaatgacggtaaatggcccgcctggcattatgcccagtacatgaccttatgggactttcctacttggcagtacatctacgtattagtcatcgctattaccatgggtcgaggtgagccccacgttctgcttcactctccccatctcccccccctccccacccccaattttgtatttatttattttttaattattttgtgcagcgatgggggcggggggggggggggcgcgcgccaggcggggcggggcggggcgaggggcggggcggggcgaggcggagaggtgcggcggcagccaatcagagcggcgcgctccgaaagtttccttttatggcgaggcggcggcggcggcggccctataaaaagcgaagcgcgcggcgggcgggagtcgctgcgttgccttcgccccgtgccccgctccgcgccgcctcgcgccgcccgccccggctctgactgaccgcgttactcccacaggtgagcgggcgggacggcccttctcctccgggctgtaattagcgcttggtttaatgacggctcgtttcttttctgtggctgcgtgaaagccttaaagggctccgggagggccctttgtgcgggggggagcggctcggggggtgcgtgcgtgtgtgtgtgcgtggggagcgccgcgtgcggcccgcgctgcccggcggctgtgagcgctgcgggcgcggcgcggggctttgtgcgctccgcgtgtgcgcgaggggagcgcggccgggggcggtgccccgcggtgcgggggggctgcgaggggaacaaaggctgcgtgcggggtgtgtgcgtgggggggtgagcagggggtgtgggcgcggcggtcgggctgtaacccccccctgcacccccctccccgagttgctgagcacggcccggcttcgggtgcggggctccgtgcggggcgtggcgcggggctcgccgtgccgggcggggggtggcggcaggtgggggtgccgggcggggcggggccgcctcgggccggggagggctcgggggaggggcgcggcggccccggagcgccggcggctgtcgaggcgcggcgagccgcagccattgccttttatggtaatcgtgcgagagggcgcagggacttcctttgtcccaaatctggcggagccgaaatctgggaggcgccgccgcaccccctctagcgggcgcgggcgaagcggtgcggcgccggcaggaaggaaatgggcggggagggccttcgtgcgtcgccgcgccgccgtccccttctccatctccagcctcggggctgccgcagggggacggctgccttcgggggggacggggcagggcggggttcggcttctggcgtgtgaccggcggctctagagcctctgctaaccatgttcatgccttcttctttttcctacagctcctgggcaacgtgctggttattgtgctgtctcatcattttggcaaaggcacctgtgattgcctcgggagttgaaatacacccagattgccaccatgaccgagtacaagcccacggtgcgcctcgccacccgcgacgacgtccccagggccgtacgcaccctcgccgccgcgttcgccgactaccccgccacgcgccacaccgtcgatccggaccgccacatcgagcgggtcaccgagctgcaagaactcttcctcacgcgcgtcgggctcgacatcggcaaggtgtgggtcgcggacgacggcgccgcggtggcggtctggaccacgccggagagcgtcgaagcgggggcggtgttcgccgagatcggcccgcgcatggccgagttgagcggttcccggctggccgcgcagcaacagatggaaggcctcctggcgccgcaccggcccaaggagcccgcgtggttcctggccaccgtcggcgtctcgcccgaccaccagggcaagggtctgggcagcgccgtcgtgctccccggagtggaggcggccgagcgcgccggggtgcccgccttcctggagacctccgcgccccgcaacctccccttctacgagcggctcggcttcaccgtcaccgccgacgtcgaggtgcccgaaggaccgcgcacctggtgcatgacccgcaagcccggtgccggcggcgggtccggaggagagggcagaggaagtctcctaacatgcggtgacgtggaggagaatcctggcccaatgggagcccggtgccgcagcttttccgcgctcctgctcctgctgcaggtctcctcatggctttgccaggagctggagcctgagtcctgcagtcccggcttcagttccgaggtctacaccttcccggtgccggagaggcacctggagagaggccatgtcctgggcagagtgagatttgaaggatgcactggccggccaaggacagccttcttttcggaagactcccgattcaaagtggcgacagacggcaccatcacagtgaagcggcatctaaagctccacaagctggagaccagtttcctcgtccgcgcccgggactccagtcatagggagctgtctaccaaagtgacgctgaagtccatggggcaccaccatcaccggcaccaccaccgcgaccctgcctctgaatccaacccagagctgctcatgtttcccagcgtgtacccaggtctcagaagacagaaacgaatgcaggttcaactggtggaaagcggcggtgctctggtacaaccgggcggtagtctgcgcctgagctgtgccgcaagcggtttcccagtcaaccgctactctatgcgttggtatcgccaggcgcctggtaaagaacgtgaatgggttgccggcatgagcagtgcgggcgatcgttctagttacgaggactctgttaaaggtcgttttacaattagccgtgatgatgcgcgcaataccgtgtatctgcaaatgaacagtctgaagccggaggacaccgcagtatattattgcaatgtcaacgtggggtttgaatattggggccaggggactcaggtgacggtgagctctcctgccatcctcggaatccttggagggatcctcgccctgctgattctgatcctgctgctcctactgtttctacggaggagaacggtggtcaaagagcccctgctgccaccagatgatgatacccgggacaatgtgtattactatgatgaagaaggaggtggagaagaagaccaggactttgatttgagccagctgcacaggggcctggatgcccgaccggaagtgactcgaaatgatgtggctcccaccctcatgagcgtgccccagtatcgtccccgtcctgccaatcctgatgaaattggaaacttcatcgatgaaaacctgaaggcagccgacagcgaccccacggcacccccttacgactctctgttggtgttcgattacgagggcagtggttctgaagccgctagcctgagctcactgaactcctctgagtcggatcaggaccaggactacgattatctgaacgagtggggcaaccgattcaagaagctggcggacatgtacggcggtggtgaggacgactagttaccaatagtcggcggttatcagcggaccctacgaagttggagtaacgaccttgaagacgagtacagagttccggtttgaatcaacctctggattacaaaatttgtgaaagattgactggtattcttaactatgttgctccttttacgctatgtggatacgctgctttaatgcctttgtatcatgctattgcttcccgtatggctttcattttctcctccttgtataaatcctggttgctgtctctttatgaggagttgtggcccgttgtcaggcaacgtggcgtggtgtgcactgtgtttgctgacgcaacccccactggttggggcattgccaccacctgtcagctcctttccgggactttcgctttccccctccctattgccacggcggaactcatcgccgcctgccttgcccgctgctggacaggggctcggctgttgggcactgacaattccgtggtgttgtcctcgagtctagagggcccgtttaaacccgctgatcagcctcgactgtgccttctagttgccagccatctgttgtttgcccctcccccgtgccttccttgaccctggaaggtgccactcccactgtcctttcctaataaaatgaggaaattgcatcgcattgtctgagtaggtgtcattctattctggggggtggggtggggcaggacagcaagggggaggattgggaagacaatagcaggcatgctggggatgcggtgggctctatggctatgagttcgttccctccttgcctcctggtggtagatagttctccaaccgaagtgtttacggaagatagagcccgctgttagccctgagtctgcgttgtaagagcaataggtccactacgcgatcgcgcttttaccacgaacgataataggttggcgggtcactccaaaaagggtcgtgcggcgatactacaatctcctgttactcgtagggataacagggtaatcctgaaaagtggataaccagcaccgttgtgagtgtctcctagacgtcaggtggcacttttcggggaaatgtgcgcggaacccctatttgtttatttttctaaatacattcaaatatgtatccgctcatgagacaataaccctgataaatgcttcaataatattgaaaaaggaagagtatgagtattcaacatttccgtgtcgcccttattcccttttttgcggcattttgccttcctgtttttgctcacccagaaacgctggtgaaagtaaaagatgctgaagatcagttgggtgcacgagtgggttacatcgaactggatctcaacagcggtaagatccttgagagttttcgccccgaagaacgttttccaatgatgagcacttttaaagttctgctatgtggcgcggtattatcccgtgttgacgccgggcaagagcaactcggtcgccgcatacactattctcagaatgacttggttgagtactcaccagtcacagaaaagcatcttacggatggcatgacagtaagagaattatgcagtgctgccataaccatgagtgataacactgcggccaacttacttctgacaacgatcggaggaccgaaggagctaaccgcttttttgcacaacatgggggatcatgtaactcgccttgatcgttgggaaccggagctgaatgaagccataccaaacgacgagcgtgacaccacgatgcctgcagcaatggcaacaacgttgcgcaaactattaa

SEQ ID NO: 114 - DNA, 28 bp, synthetic construct
  source 1..28: mol_type = other DNA
aatattaaacacaaactaccacctacct

SEQ ID NO: 115 - DNA, 22 bp, synthetic construct
  source 1..22: mol_type = other DNA
tggttctcagggtttgttataa

SEQ ID NO: 116 - DNA, 20 bp, synthetic construct
  source 1..20: mol_type = other DNA
cgggagctctccatgcattt

SEQ ID NO: 117 - DNA, 22 bp, synthetic construct
  source 1..22: mol_type = other DNA
gacagatactgcgacatagggt

SEQ ID NO: 118 - DNA, 21 bp, synthetic construct
  source 1..21: mol_type = other DNA
gctaagacccaaactgggatt

SEQ ID NO: 119 - DNA, 21 bp, synthetic construct
  source 1..21: mol_type = other DNA
ggtttgctgaagatggcggta

1. A population of cells, comprising one or more cell of a first mammalian species and one or more cell of a second mammalian species, wherein the one or more cell of the first mammalian species comprises an exogenous nucleic acid encoding
(a) an antigen-binding protein that specifically binds to an antigen; and
(b) a cell membrane signaling peptide and/or a cell membrane anchor protein,
wherein the antigen-binding protein is expressed at the cell surface of the one or more cell of the first mammalian species and specifically binds to an antigen at the cell surface of the one or more cell of the second mammalian species, and
wherein the antigen is endogenous or exogenous to the one or more cell of a second mammalian species,
optionally wherein the population of cells is a chimeric embryo or a chimeric blastocyst.

2. The population of cells of claim 1, wherein the cell membrane signaling peptide of the one or more cell of a first mammalian species
(a) comprises at least one transmembrane domain;
(b) binds to a signal recognition protein (SRP);
(c) targets the antigen-binding protein to the endoplasmic reticulum (ER) membrane;
(d) introduces a lipid anchor, optionally wherein the lipid anchor is glycosylphosphatidylinositol (GPI); and/or
(e) localizes the antigen-binding protein to the cell membrane.

3. (canceled)

4. The population of cells of claim 1, wherein the membrane signaling peptide comprises an amino acid sequence selected from any one of SEQ ID NOS: 1-4 or 8, or an amino acid sequence having at least 80% identity thereto.

5. The population of cells of claim 1, wherein the cell membrane anchor protein of the one or more cell of the first mammalian species
(a) comprises at least one transmembrane domain;
(b) localizes the antigen-binding protein to cell surface of the cell of a first mammalian species; and/or
(c) is glycosylated or is not glycosylated.

6. The population of cells of claim 1, wherein the cell membrane anchor protein of the one or more cell of the first mammalian species comprises one or more transmembrane domain selected from a CD8 transmembrane domain, ICAM1 transmembrane domain, E-cadherin transmembrane domain, CLDN6 transmembrane domain, ITGB 1 transmembrane domain, ITGB2 transmembrane domain, JAM-B transmembrane domain, NCAM-1 transmembrane domain, MUC-4 transmembrane domain, PDGFRA transmembrane domain, or fragment thereof each, optionally wherein the cell membrane anchor protein of the one or more cell of the first mammalian species is selected from CD8, ICAM1, E-Cad, CLDN6, ITGB1, ITGB2, JAM-B, NCAM-1, MUC-4, PDGFRA, or a fragment thereof each.

7. (canceled)

8. The population of cells of claim 1, wherein the cell membrane anchor protein of the one or more cell of the first mammalian species comprises an amino acid sequence comprising the sequence set forth in any one of SEQ ID NO:9-13, or an amino acid sequence having at least 80% identity thereto.

9. The population of cells of claim 1, wherein the antigen-binding protein of the one or more cell of a first mammalian species comprises an antibody or antigen-binding fragment thereof, optionally wherein the antigen-binding protein comprises a fragment variable domain (FV); a fragment antigen binding (Fab) domain; a Fab′; a (Fab′)2; a half-IgG; a single-chain fragment variable domain (scFv); a diabody (di-scFv); a triabody (tri-scFv)′ a single chain Fab (scFab); a minibody; an scFv-Fc, or a nanobody,
optionally wherein the antigen-binding protein of the one or more cell of a first mammalian species is a nanobody, optionally wherein the nanobody is selected from an anti-GFP nanobody, further optionally wherein the anti-GFP nanobody is selected from vhhGFP4, LaG-2, LaG-3, LaG-5, LaG-6, LaG-8, LaG-9, LaG-10, LaG-11, LaG-12, LaG-17, LaG-18, LaG-43, LaG-19, LaG-21, LaG-42, LaG-24, LaG-26, LaG-27, LaG-29, LaG-30, LaG-35, LaG-37, LaG-41, LaM-2, LaM-3, LaM-4, LaM-6, or LaM-8.

10. (canceled)

11. The population of cells of claim 1, wherein the antigen-binding protein of the one or more cell of a first mammalian species comprises the amino acid sequence set forth in any one of SEQ ID NOS: 9-36, or a sequence having at least 80% identity thereto.

12. The population of cells of claim 1, wherein the antigen-binding protein, cell membrane signaling peptide, and/or a cell membrane anchor protein of the cell of the first mammalian species are connected with linker, optionally wherein the linker comprises the amino acid sequence set forth in any one of SEQ ID NOS: 5-7.

13. The population of cells of claim 1, wherein the antigen of the one or more cell of the second mammalian species is endogenous to the second mammalian species, optionally is endogenous to the first and second mammalian species; or the antigen of the one or more cell of the second mammalian species is exogenous to the second mammalian species, optionally is exogenous to the first and second mammalian species.

14. (canceled)

15. The population of cells of claim 13, wherein the one or more cell of the second mammalian species comprises an exogenous nucleic acid encoding
(a) the exogenous antigen; and
(b) a cell membrane signaling peptide and/or a cell membrane anchor protein, optionally wherein the exogenous antigen is a selected from mCherry, or an isoform thereof; or green-fluorescent protein, or isoform thereof, optionally wherein the exogenous antigen comprises the amino acid sequence set forth in any one of SEQ ID NOS: 14-16, or a sequence having at least 80% identity thereto.

16. (canceled)

17. The population of cells of claim 15, wherein the cell membrane signaling peptide of the one or more cell of a second mammalian species
(a) comprises at least one transmembrane domain;
(b) binds to a signal recognition protein (SRP);
(c) targets the antigen to the endoplasmic reticulum (ER) membrane;
(d) introduces a lipid anchor, optionally wherein the lipid anchor is glycosylphosphatidylinositol (GPI); and/or
(e) localizes the antigen to the cell membrane.

18. (canceled)

19. The population of cells of claim 15, wherein the cell membrane signaling peptide comprises an amino acid sequence selected from any one of SEQ ID NOS: 1-4 or 8, or an amino acid sequence having at least 80% identity thereto.

20. The population of cells of claim 15, wherein the cell membrane anchor protein of the one or more cell of a second mammalian species
(a) comprises at least one transmembrane domain;
(b) localizes the antigen to cell surface of the cell of a second mammalian species; and/or
(c) is glycosylated or is not glycosylated.

21. The population of cells of claim 15, wherein the cell membrane anchor protein of the one or more cell of a second mammalian species comprises one or more transmembrane domain selected from a CD8 transmembrane domain, ICAM1 transmembrane domain, E-cadherin transmembrane domain, CLDN6 transmembrane domain, ITGB1 transmembrane domain, ITGB2 transmembrane domain, JAM-B transmembrane domain, NCAM-1 transmembrane domain, MUC-4 transmembrane domain, PDGFRA transmembrane domain, or fragment thereof each, optionally wherein the cell membrane anchor protein of the one or more cell of the second mammalian species is selected from CD8, ICAM1, E-cad, CLDN6, ITGB1, ITGB2, JAM-B, NCAM-1, MUC-4, PDGFRA, or a fragment thereof each.

22. (canceled)

23. The population of cells of claim 15, wherein the cell membrane anchor protein of the one or more cell of the second mammalian species comprises an amino acid sequence comprising the sequence set forth in any one of SEQ ID NO:9-13, or an amino acid sequence having at least 80% identity thereto.

24. (canceled)

25. The population of cells of claim 1, wherein
(a) one or more cell of the first mammalian species is a human cell and the one or more cell of the second mammalian species a cell of a non-human mammalian species; or
(b) one or more cell of the first mammalian species is a cell of a non-human mammalian species and the one or more cell of the second mammalian species a human cell,
optionally wherein the one or more cell of the non-human mammalian species is selected from: a rodent cell, optionally selected from a mouse cell or rat cell; a non-human primate cell, optionally selected from a monkey cell, chimpanzee cell, gorilla cell, orangutan cell, rhesus macaque cell, marmoset cell or bonobo cell); or an ungulate cell, optionally selected from a pig cell, horse cell, cattle cell, sheep cell, goat cell, or donkey cell,
further optionally wherein the one or more cell of the non-human mammalian species is organogenesis-disabled.

26. (canceled)

27. (canceled)

28. The population of cells of claim 1, wherein the one or more cell of the first mammalian species or the one or more cell of the second mammalian species is a stem cell, optionally an embryonic stem cell,
optionally wherein the one or more cell of the first mammalian species or the one or more cell of the second mammalian species is an induced pluripotent stem cell (iPSC), embryonic stem cell (ESC), or epiblast-derived stem cell (EpiSCs),
further optionally wherein the one or more cell of the first mammalian species is an iPSC and the one or more cell of the second mammalian species is an ESC, or the one or more cell of the first mammalian species is an ESC and the one or more cell of the second mammalian species is an iPSC.

29. (canceled)

30. (canceled)

31. (canceled)

32. (canceled)

33. A method of generating an organ, organoid, or tissue mass comprising of a first mammalian species, the method comprising the steps of:
(a) providing a population of one or more cell of the first mammalian species comprising an antigen-recognition domain at the cell membrane, and providing a population of one or more cell of a second mammalian species comprising cells expressing an antigen at the cell membrane, optionally wherein the first mammalian species is a human, and the second mammalian species is a non-human mammalian; or
providing a population of one or more cell of the first mammalian species comprising an antigen at the cell membrane, and providing a population of one or more cell of a second mammalian species comprising cells expressing an antigen-binding protein at the cell membrane, whereby an interspecies chimera is generated, optionally wherein the interspecies chimera is a chimeric blastocyst,
whereby an interspecies chimera is generated; and
(b) culturing the interspecies chimera to under conditions that allow the interspecies chimera to develop into the organ, organoid, or tissue mass of the cell of a first mammalian species,
optionally wherein the organ, organoid, or tissue mass is a kidney, liver, heart, lung, pancreas, muscle, stomach, intestine, spleen, bladder, reproductive organs, bone marrow, or skin.

34. (canceled)

35. (canceled)

36. (canceled)

37. An organ, organoid, or tissue, which is developed from a population of cells as described herein, or a method as described herein, optionally wherein the organ, organoid, or tissue is a human organ, human organoid, human tissue, and/or comprises more than 90% human cells.

38. (canceled)

39. (canceled)
